United States Patent Application Publication US 2026/0258423 A1 - sequence listing, part 56

SEQ ID NO: 301568 - DNA, 83257441 bp, Homo sapiens (residues 36,291,720-38,426,526 of 83,257,441)
  source 1..83257441: mol_type = genomic DNA
tccttggcctccagaagtgctggtattacaggcgtgagccactgctcccggccctgaaaaatgtttcttaacaataactaggaactgtgctgtgtgttttatataagagtatattatataattttttttttctttgagatggagtctcactctgttgcccagactgagtgcagtggtgcgatctcagctcactgcagcctctacctcccaggttcaagcgattctcctgcctcagcctcccaagtagttgggattacaggcgcacgccaccatgccctgctaatttttgtatgtttagttttaccatgttggccaggctggactcaaactcctgacctcaagtgatcctcccacctcggtctcccaaagtgctgggattacaggtgtgagccaccgtgcctggcccccaatctttaattaagaagcaggtgccaggcacaatggtatactcctataatctcagctactcaggaggctgaggtgggaggattgccagtgcttgagcccaggagtttgagaccagcctgaacaacatagtgagacccttatctcaattttaaaaagaaagaattaggtaatgatatgattttaattttataggtgtggaaacggaggcttagagaattgaataatcatatataccttataagattctctcatactccatttttaaaagttttcgatcaagtttaagttgtattgatacacgatatatagtgaagtgtctatgtacaatgcttaatttacatatatacatttccaattatgaatatattgcaaactgtattagtgaatgaattattcatttatcatatcagtattatatattactataatatataaatatactaattatatattagtattaatgtaaacattaatttagaaatacttttttctccagtgaagcctcctcagacttctcatatgcatcttcagtatttatgggtttctaccctttaaacagtctaacagttccagagcaaatattatcttctaagaggtttgagatagatccttatttgaatcagtatattatgttgtgactggaaattttatccctagccatgtctctattcacataacattagtaaatgtgatttttcattaatatatttcatatgagtagcattaatgatctccatgacataattacttagtctgttgcttttgaagtgattcattcattctacagatacttactgaacacacactatgtgccagaaactgctagcattggaagtagagctgtgaacaaaatcaagcatcaacatttctgatatttgagaagacaggcaacaagcaaatatgtgatgtaaagtagtgataagtgctgtaaaatcacaagagggtatagaatgaggattgttcttcaagttgatagaacagatctttaaagaagtgatttgaggctgggcgtggtggcttacacctgtaatcccaacactttgggaggccgaggcgggtggatcatgaggtcaagagactgagaccatcctggccaacgtgctgaaactccgtctctactaaaaatacaaaaattagccaggcgtggtggtgcgtgcctgtagtcccagctactcgggaggctgaggcagaagtgcttgaacccgggaggcggaggttgcagtgagccaagatcatgccactgcatgccagcctgggcgacagagcaagactccatctcaaaaaaaaaaaaagatgattcgaggcttcgtgtggtggttcatgcctgtaatccctgcactttgggaggctgaggcaggaggatcacttgagctcgggagtttgaggccagcctgggcaacatggtgaaaccccatgtctataaaaaatacaaaaattagtcgggtgtgatggtgggcgcctgtagtcctagctatttgggaggctgaggtgggaggaacacttgaacctgagaggtcaaggttgcagtgagccaagatggcagcactgtactccaggttgggcaacagagtgagaccctgtctcaaaaaaaaaaaaaaaagtgatttgagcagaggcctgaatgacataaagtgtttagatatctggagactttgcaagcagatgcagaaaccctggggttggaaaatgcttacagtctgaatagtaaaagaggcaccaccagcatgacttctagttattgtgctacaccctgcacatttttttttctttttcgagacagggtctcactctgtcacctagatgggagtgcagtggcatgttcatggctcactccagcttcaacctcctaggcttcagcaatgctcttgcctcagcctttggagtagctgggaccacaggtttgtgtcaccacgtatgactaatttttttttatttttcctgtgttgcccaggttggttttgaactcctgggttcaggtgatcctcctgccttggcctcccaaagtgctgggattccaggcaagagccaccatgcctggccctgggcaacatttttattgtcagtcatttaatagcctagtctaatggatgtgtagtgatatgtcattgtgattttaatttgcctttccttaatggctaatgatgctgaacacttttttatgtgctttttttttttttttgccatttataaattttcctttgtgaagtttaagtcttgccatttttaaattgggttgtttacctttttattcaacagctgtaggttttttgtttttttttttttgatacagagtctcactctgtctccaggctgtagtgcagtggcacatcttggctcactgcaacctccgttcccaggttcaagtgattctcctgcctcagcctcccaagtagctgagataacaggcatgcaccaccacgcatggtccacccacctcggcctcccaaagtgctgggattacaggcgtgagccactgcgcccagcccagaaaggaacattcttaagcattgaagtgattcttgtcaaatttgatttctattcaaatttaggagctgggccaggcacggtggctcagccctgtaatcccagcacttcgggaggctgaggtgggtagattgcctgaatccaggagtttgagaccaggctggacaacctggggaaacccctgtctctactaaaaatacaaaagattagatgggcctagtggcacctcacgcctgtagtccccagctaccccggaggctgaggtgggagaatctcccgaacctgatgggaaaggtagcagtgagttgagatagtgccactgtactccagcctgggcaacaaagtgagaccctgtctcaaaaaacaaaacaaaaccaaacaaatttaggagctagcttgtgattgtagaaataattttggcaatagaagtgagggaactgagttgtagtctagctagttaacatgtgacaaaccattaactttatatgtctcattttcttcatctgtaaaatgaggaagatttgattagaggatttattaaagttcttttaaaatctgaaattacagtttcttaattggttttgtagagattttggctttataaaaatgtgtgaaccatagtgacagcagaaacatttgaaatcctatatttgggtgattcataaaagaaaggaagaattatgggcatcttgcctgtaaaatgttatgtaatctgaatcattgttacccacagcatcctgtgactgataaaggtactcatggccacctctcctcccttgtctttctgtagtactttcctttctccccacctcaataatagctttattgatgtataattcacataccatacatgtcatctattaatatttaaagcatacaattcagcggtttttagtctatttacagagttgtacagccatcatcacaatcaattttagaacactttctgaactccagaaagaaagtaccctgcctatttcccctctatcacctagccctaggcaactatgaatctactttcagcctccatagattgccctgttatggacaaatatgtggctggtttcttagtataatgttttcaaggttatttacgttgtagcatgtgtcagctatttcatttctttttattgtcaaataacattcagttgtatggatataccacattttatctattccatcagttgatggacatttgagttgttttcattttgggattattataaataatgctactatgaacatttgtatacaaacattatgtggacatgtgttttcatttctcttggacatatacttaggaatgggattgctgtatcacatgatacctctgtatttaaccttttgaggaattgccaaactgttttccaaaagtggctgcaccatttacattcccactatcaatatatgctccagtttctctacatcctaccttatactttttttttttttttctttttttgagacagagtctcgctctgtcgcccaggctggagtacagtggcacaatctcggctcactgcaacctccgcctcctgagttcaagcaattctaaattatcatgcctcagcctcccgcatagctgggattagaggcgtttgccaccatgcctggctaagttttatatttttagtaaaaatggggtttcgccatgttggccaggctgttctcgaactcttgacctcaggtgatccacacgcctcgtcctcccaaaatgctgggattataggtgtgagccaccatgtccggcctgattggccagcttttcatttggaatggggataggacatagttggaagttggtgtctttggttatttccctaacatgtccaagcatcctaaagtatcagtcaaataagcagtctcttctcattcctggcagagagtaagtcaaagccttaattcaatttgcatacctgttttcatgtaacaacaaataattttttttttttttgagacagagtttctctgttgttgtttaggctggagtgcaatgatgcgatcttggctcactgcaacctctgcctcccgggttcaagcgattctcctgccttagcctcccaagtagctgagattataggcatgcaccaccacagccggctagttttgtatttttagtagagacggggtttctccgtgttggtcaggctggtcttgaactcctgaccccaggtgacccgcctgcctcggcctcccaaagtgctgggattacaggcgtgagccaccacgcctggccacaacaaagaattttaccagaagtgggtatgatttatatcttagtttgaattgctacttacctttggggaacagacctttccttgatgtatctttaacactgaaatcttggcaagttgccaagtctcaaatgttcatgagtaagactgcaatatcacaatatcatagtcacacaggaatctgatagaaaagcatcacatttataaagccttctttcctgtacatcactgacgttttgtgaattttaaagaatttgtaattatttttaaggagcatatttaatgtagttaatgtaacctagaataggctcatttgaaatgaaactcttgctaataggaacttaattcaccaaattaagaatatttagtttttgtagagattttgctcttgaaaatgttgcagtcttgatttcgtcttgtcagtccagtcagaattgtgaagtatttttttttctcattccagaaatacatgctacaggatttaactatcagaatgaagatgaaaaagtcaccttgtctttccctagtactctgcaaacaggtaagagacatagcttttgtaaaatctcgtgatgaatatagtgacatctgacttcctccagagaaatttattgtatgccattttttccctcgttgttattagcagattaagtattaagagcttttttttttttttactttgagacggagtcttactctattgcccaggctggagagtagtggcatgatcttggctcactacaacctccaccttccaggttcgagtgattctcctgcctcggcctcccgagtagctgggattacaggtgcctaccaccacaccggctaatttttttgtatttttagtagagacaaggtttcgccatgttggccaggctggtcttgaactcctgatctcaagcgatctgcccgccctggcctcccaaagtggtaggattacaggcaggagccaccacgcccagctgtattaagagctttttaaagaggtttgttgcaacttttgggccaccagcatttccttctgcggaagttgggctacgaaaagcagggtttccacctcctgtcactctatattctctttaaacaaacaagccaagaaaaacaggacaaaaactaaagatcattctatcctagaatgtaatgtattgttttccagttttacctttttaaaaatacctttacctaggccaggcgtggtggctcacacctgcaatcctagcgctttgggaggccaaggcgggctgatcacttgaagccaggagttagggaccagcctggccaacatggcaaaaccccatctctaccaaaaaatacaaaaattacccagtgtggtggctcatccctatactcccagctactcagaaggctgaggcaagaaaatcgccagaagtcaggaagtggaggttgcagtgaaccgagatcatgccactgcactccagcctgggtgatagagtgggactctgtctaaaacaaacaaacaaaatacttttacctagctccatcttctattaattcaatccaaatccctgaagtgaatggtcacagatgattttgatatacaaccagagatcaaataggtattgtgttattgagggcacagaaagaaagatacgttgatatgttactattgttaggtataaaagcacaaagaaatagactttctgagcttagtatatgtggaagaaattatataccaatcaattggtgaagtactaagactttgatgaatgaacaaatgaaaaggaacagataattcaaaaggaagaaaatgtaaatgactaataaacatgcgaaaagatattgagcctcctagtaatgagaaatttttgcttctcatgtgagctgaaattttaaaaattcccaatgatatggctgccttgatatcgctggggggagtataaatccatgtaatttttttgtaaagcattctggcagtatatcaagagcctaaatatgttcatgtcctttgacccagcaattctgctaataggaatatatcccaaggaaaagtcataaatacagaaaatactttatgcccagaagtgtctgagatattacttacggtagtaaaaaattataattaatatatttgttcaacactaaggaaatgatcaagccaggaatgatatatctatatagtgaaatatacttagcaattaaaagtgaggtttgcgaattcttaaccctgtaaagtgcttattataatgtaaaattgaaaagaagaatataaaattacatatttaaggtggtgaatcatgtctctaaatggcacaaataaaatgataattatgtctgggtgttgacataattggtgatttttattcttatttatatcttttgtctgattttcacaattttcctactgagaatctattgaattaatataaaattatttttagaaaaaatttaaattggagatgtttagtcttttatttcagtgctcttggaggccctttatgtgtaattattataaaaataaatgggccgggcgtagtggctcacgcctgtaatcccagcactttgggaggccgaggcgggcggatcacgaggtcaggagatcgagaccatcctgactaacacggtgaaaccctgtctctactaaaaatacaaaaaattagctgggaatggtggcaggtgcctgtagtcccagctactcgggaggctgaggcaggagaatggcgtgaacccgggaggtggagcttgcagtgagccgagatcgcaccactgcactccagcctgggtggcagagtgagactccgtcccaaaaaacaaaacaaaacaaaacaaaaaatgctttgccatgaacatgtattaaaagctattgaagaatataatttgaaaaggaaggagattctttcgctgatttcttctacttccattgtctggtgaatctgtctagaaatattcctatgtatatataaatttatgtatataatttaacccacagataggatcacaaatctcagtggcttataaccactgagatttctttcttttttacacatgggccatgaggactgctgatcatatgcagccatatcaccaactctgctggctccacttggctcccaactgtctttccaggactagtagtcagcgagcagccactctctgtatcatgcatggcagagggcagaggctcagggatggggagaaagctagaccacaaagacacatttaaaacttctgcatggccaggcgtggtgactcacacctgtaatcccagcatttttggaggctgaggcaggaggattgcttgagcccaggagttcgagaccagcctaggcaatgtagtgagaccctgtctctataaaaaataaaataaaaaataaaatttctgtgtgatggtggtatacttgatgtctactcacatttcattgaccaaagcaagtagcatgaccaagcccaaagtcactggggtagcatttaacagacatttgcgaaaagtttctaatgaaagatagggcaaaaagcaaaattataagtataatagaaataaaggaagttggaaaaagcaaagacaaatctaaagaaagttaaaaaaaaaacaaacccatagctaattactatccttagagagttaagagaaagcattgcgtgcattaaacaaggacaggacagaatgccatcagataggaagaattacagcaggaaaacttggaaattatgataggtataaaaaacccagtaaaagtgttaaagatgaagttgaggaaacttccaagcagtagaaaaaacagatagaaaacagaaaaatagatttgagaaccagtccagcagaaccaacatccatctagtaaaacagaaagcagaggaaatgggaagaggattttttaattttcatttttgcaacagaatcttgctctgtcacccaggctggagtgcagtggtgcaatctcggctcaccacagcctccacctcgtgggttccagtgattctcctgcctcagcctcctgggtagctgagattacaggcacacaccaccacgcccagctgatttttgtatttttagtagagttggggtttcaccatgttggccaggctggtctcgaactccggaccttaggtgatgtgcccacttcggcctctcaaagtgctagggattacaggcgtgtgccactgtgcccggccagaagagaaactcaaaaagacaggaacatttccttgaactgatagagcaggagccttcagtttgcaaaggtacaccattgagagagactagcttaaaaaatgtaaaaattgccacactgactgaaattttagaacttctgcgataaagtaaaactcccagaaagttcctgtctgggatagggggcaataggagggaaggcaggtagcatactacctttaaaatttaggaatcagaatagtcctagacttaccattaggaacagtggaaacttagactctaatgaagctgttcattcaaaatacaaagtgaatctgattttcaacctaagattgcatgcttagcccaactttgaatttcggagtaaaaatattttcagatttgcaaggtcatagaaaatttgattctttgtaaaagatattggagtgggggatggattagctaaagcatgactttctacagtgaagagaaaatgtctaaagttgaaaaatgaagaaataggccgtggtcgtggctcatgcctgtaatcccaacactttgggaggctgaggtgggaggattgcttgcccaggaattgaaggctgcagtgagccgtgattgtaccactgccctcgagcctgggcgacagagcaagactgtctcaaagaaaggaaaagaaaaaatagctgtgtaagcaagacatttagaagtcacagagtttgaaattgattgcttctaggggcagggtgtggggagtagggcctagtgttgagcagggcctggagcttacgtattttaaactgtgaactattactttgatagaaatttaaaaaattttagagttttaaatctatatcattacagactatatatattctgtgtttacactgtgaaaaaattagaagtcaatagaaaaagagaaatgaaaaaaatccctttttatatatttgaaaaaattatacctctgaataattgagtcaaagaagacttgttatggaaattagaaaatatttagaactgaataatgaaattaccacatatgaaacattagggataaacatgtttcatatgcagataaaatattagaatatttagttaagaagaaagactgaaaattaattagctaagcattaaactcataaaaacaaaaggtaacttggagaaagtagaagaaagttttaagagcagaaacaaatgaaataagtgaagtgaggggcagaaatattaaaaaactgatatttaaaaatagtcccaaaagatatataaacctagccagtatagaaaataaaagcgtagattgaattgttgttcagcattaggaaatatggtaaccatttttcattaaatttaaaaagttaaacattctatatttatcaaaaggaatcagtttatttgctagaattcaccagggaagagtagacagaaacttctaacatgatagaagatatgtattacacacacacacacacacacacacacacacacgacataatctgtgccaagtactgttttaagtgcctcaaaaatattaatttatttagtcctttcaacaaccttttgaggtagatttgttttgtgacaaagtctctctgtcacccaggctggagtatagtggtgcagtcacggctcactgcagcctcaaactcctgggtttaagtgattctcccacttcagcctcccatgtagctaggactgcctacacatgacagtgcatctggttaatttttaaatttttttgtagagacagggtctcgttatgttgcctaggctggtctcaaatgcctggcctcaggtgatcctcctacctcagagagaggatcttgccatcctcccaaatgttgaggttacaggcatgagccactacgccagccagattctgttacttctattttgtagataaactaaggcagaaaaatgatttcagtaacttaaataatttgtccaaggtaacatagctagtaagtaacatagctgggatttaaacccaagcagtttaactcaaaagtctgcacttttaaccaccacattgtgctatctttatttttcaaattaaatatttcaaaaacatagtacatttacataatttgaaattcaaatgctatgcaatgaaattttgtttgccagtctaccctgtcttctttctcagctccattcctcaacagaatgaaatgaaattttcctttcaaaactataccctgcttttgtaagcatttatatatatactttttaagaacacagaaatcaccatgccatacataatgttctgcacctttcttcttttccccttaactgtaaatattggaggccatttattactagtatataagagatgtatcattcttgataaggtctgtttacagcagacatgctaaatggtgaagctatttcaaataataacaaacaagttagagaaggttatgaccattagtatagtatgatttaacataatttttgatatttttggccaatataacaattttgagctaatataacaactgatataaatattagaacagaaaaattatcttgcaggtgtgacaatattgaattattattattattattttttgagatggagtctcgctctgtcgtccaggctggagtgcagtggcgcgatctcagctcactgcaagctctgcctcctgggttcatgccattctcctgtctcagcctcccgagtagctgggactacaggtgcccgccaccacgcccggctaattttgtttttgtatttttagtagagatggggtttcactgtgttagccaggatggtcttgatctcctgacctcgtgatcctcccgcctcggcctcccaaagtgctggaattacaggtgtgagccatcacgcccagccgacaatattgaattattgaatatctgtttgaaaccattggctttcacattttcccaaggtttgctttaaaaatgaagttaatctttttcaagacagattgcacaagtgatctatctgataatgaagcaaatactgagcttatcttaggaggacattaataacctttgtgtttagcctcatcaaatttaacagtaatgcaagctattatacagctaagtaaaacctacttttctgaaattggcaccattctgggatagtgattaaattaccataattattgtaaggtctaacaaccttagaattagtggctgagggtcctgagggtggcatttatatggagaaacactggtagttgtcagcattttgaagagtcaaaaacaagataataaaaagtggtgacacatggcgaaaccctgtttctactaaaaacaaaaattagtcaggcctggtggcgcacgcctgtagttccagctactcaggaggctgaggcaggagaattgcttgaacccgggagccgaaggttgcagtgagccgagattgcaccactgcactttagcctgggtgacagactgagactgagactccattttccaaagaaaaaaagaggtggtgacacaaaggcaacgatctttattccctttttgtataaattaatctctttatttttatagcatttagtagactcattaaatttcttattattaaagtatttcaagatttactccaggttttacaattgttatactctcctaagctttaaacatttaaggtttttgatggaagtcccaatttttcagttgtttactttataaacgagcttgatgtatgtttcaaaaggtttacaaccccaaacataaatatttcatacattggatatgaaataaggtatctaatttgaggaagtggtgtaaattatgtgtgttgataggtataaaattagacaatttggcaatccgttcattaatatggtgtaaatttgataaatgaaatttattaaaaagtcattttttctcctacttgccctaaaattctactatatgaatagtaagtaaatactttgtaattggtatcatataatgtgacactaattaaacttattaatgatttttaaatactttaacttgtgttttgtttgaatttcaggtaataactctttccaatactttgtattttgtttagtatgccactttttggaagtggtcactgtcaatatcttgttatggtttgatggccttggagatttaaaaccgagtaaaagtgtaagcagtctttcttatttagttatgagttttaaaaccacttatgttccaactaggaaaaaatgcaagtagatttaccatgaaatatgaattatatttaaaaaacatcttaacagttgactgacttagtgaaacagactgggcaattccacttatggaattgtaacataaaattccatcatatagtttccattaaaggtagtaggtttttataatctgttagacgttctttgcaaactttattaatgtgaatacatttgcttttttaaaaaaattaagtgaacttctaaagaaaatagaaattaaaaatttttaatttaaattttgctttatagtttaattttttagtatcatttagaattatcaattattttactatatccatatatactgtcccagtaacctgtcattctctttaaagaaaaaagtattcattgtcctctttagatatttacaaatatctgatttctaaaaaataaacatcacaaatgtctattcaattaagcttcagttgagttgtttttttctcagaatgattaagaatatagcactttcattagtggtgactttgctctaaaggtctgaaattttcacttaaattactttcagaaccagtttgaggcatcaggctagagacagtttgtagtttgtcattcacttattctgtagactctcactccccataacttttggtcctttccaaaagcaaattcaattttataagatgaagatttgactttgagatcattcaaaagagtgtcagaggggctgggcacagtggctcatgcctgtaatcccagcacttcgggaggccaaggtgggtggatcacttgaggccaggagtttaagaccagctggccaacatggcaaacccctgtctctactaaaaatgcaaaaattagccaggcgtggtggtgcccgcctgtagtcccagctactcaggaggctgaggcacaattgcttgaacccaggaggcggaggctgcagtgagccgagatcacaccactgtactccagcctgggcaacagagtgagcctctgtctcaaaaaaaaaaaagagagaaagagaaagtcacaacattttgaacaatgtcaaatgtcattgctctttagcgttccaaaatgacaatttgaaacattaggatataaaagtttggtatgattggttaattactttatagtcatgccctatctttgatttgttagacttcccatgctttaaatcttgatatacgtagggcctttaaaatggtcaactaaaaagtcaccattcctctacgttttttcgtgacttgatttgtaaaacacagaatgggattactgttttgccatgcatctgtatttagcagatgattactagataataattataattttttatgttataaaaaagaaagtatataaactcaaaaaagctcacttttttgtctaaattgtttttgctcttatacaatagaatacatatttaagttgtatttttatttgcatttaataatttattaattaaatgtatttctttgtcagatttcaaatgattgaggtgacttgtaagaatttgttttatgccctgttgctgatcaaatcattggtcttccctatagctccttacaaaattatgcaatcagtgttccatttggagtaaacatttagtgtcttatcttgatagagtaattggctacatttctctttctatgcatgaagttgtgtaaaaggaccaattcacatgtataattggcagagagcatggattctggacttaacattttatcccattctcactacttactaattttatgacactggacaagttatttagcttctcagcctcagtttcctcatctgaaaaaatgaggacaatatctacttccaggtttataaatagttatatatattttaaaagcactgtgcacaatagcacatatcaggcatttaagaataaatgtttgtttcctttcctgttcttattttcacatattggtagtttgagactaagttaataactttttaggcagtcaccctaaacatgactttcaagagttattttaggattagtctgccttttactttagtaagtactgtattctctccattgccaggaggaatatttgaaaaaggaaggaatgatttgaacattgtaaatagctaactgaatatagtgtcttgaggacatatttttggtaactgtgtttaacatctccataaaagtgttttttatttatcttcaatcacaggtacgggaaccttaaagatagattttgttggagagctgaatgacaaaatgaaaggtttctatagaagtaagtatactaccccttctggagaggtgcgctatgctgctgtaacacagtttgaggtatgggttattcttctctaaaatattattattcttaaattaggcattctgacaaaggtgtgtttattatgtggggtgattatttgaggctaggtgcccttggccatgattgtattcacaattttagaatttttattttatatttagccattatctctatagaaaggagggaattaagggtatgggttggggaatgattatatacagttatacacacagacattcaaacacacgacacattttgatacctgaattgcctatatactgtgtacctttcttaaaatcattctcttagtatttgacacctatggcttttcctacagtattattagctgttttctagaattcctttccttctttgacatcttttgtttatcttactgtagtatctgtgctgtctttgattttttttctctctctctctgtgtgtgtgtgtgtgtgtgtgtgtgtgtgtgtgtgtatacatatatatatacacacatatatatatttgctgtcctacgtaggccaggatgatttttatttgtcaggtatttgcaaattatatacattgttttgaatctgctagtcgtatttttaagtgttaaatctaattaaatttatttctataaatttcagtatggataaagaaacaattcatgatatccattcttatgtttctgcccatatccctatattgtttgcttgtttgggataacctaaaattttttatccagtttactactaatttgttttacctgatgtatcttctctttcaataattttatgttaccttctgtttagaataatatttgccacagatatttaggtttaattctgtgtttgaatgattccaatgcctttctctacccactttgaacacttcatcctggaatggttggctgatgtatgtctctaaacaattttttttttaggagaaggtatgtgggtaatgtaattcctaaacctttgcttttctgaaaaatctttcatttgcctttatacatgaccagatttactgggtatatagatttgttgatgaaaaaaggtaaaaagagcaacttttgacatccagaggttgtctggcactcacagctagcccgtgttattctccctattagacataatattacagaataccaactttagacaaggctacttgagaccataataaagtgagacaaaacaagggatccataattttgcctaggtacagtacatacaggatcactatgctacccgcaaaatatcaaacatctccatctctcagttaaaatgagtgactactgcttctttaccaattacggttttagatttgctctagtctggcctccgtatagataagatttattgagatacatacccatagaattgcctcataggacttcttgcagcactcaatctagagtgaatccctgtttacttagaccctcttccaaatcatgtaaaccaaatcccaaatcgtatagtgggttctttcttacattcttatggagacaccagtggttccctgtggtgtgagttctctcttgccatgagtaataggcccagctcattcaattgtaagagtagtacaatcagcttacaatttttcactttcaaaagtctgtgaatattgtttccaaagtcttctacatctcactttttcaagaggaggggtcacagactaaaatgtttcttcttcctttgtaggtaagatgttgtttcgttttgctttattttcttcctgcttgcttgttaaattatatcttgatatcgaaaattaaactgttttttaaaccaggtgttcacttttcattgatttttgcatagtacttggtgaaccctattgatttttagattcaggtaatttttcagtgtgaaagagtttttctgttatatcttcactgtgatatccattccattcccttctcagttaatactcagtttagctctagtatctgtctctcaaattatgtttaattgcttttatcactttgtcctttagatattttcaaacttaaatcttgttatctgtcattaatttcctttagtataaattcatttctctactgctgctgcttctaatttaaatgcttctgtgctgccatttctttccttatactctcccttcttttcagatgtcttttttattcattgatagaattcattatttatttaatgtttttgagaatgtagtcagccaagtttcttctacctctttggtttgtttgtttgtttgtttgttcgtttgtttgtttgttttttagtcggagccttgctctgtcgcccaggctggagtgcagtggtgcaatcttggctcactgcaacctccgcttcccaggttcgagccattctcctgcctcagcctcccgagtagctgggattacaggcatgtgtcaccatgcctggcttatttttgtatttttagtagagacggggtttcaccatgttgaccaggctggtctcgaactcctgacctcaggtgatccgcccacctcggcctcccaaagtgctggaattacaagcatgagccactgcacccagtctgttgtttctttttatgatacagtatcttgtcattggttccattttatttactaaataaatggaaaattctgtttactgaagtgtctttcctttataactgataccctgcagaacccctaagttttattttgctttcataaggttgctcttttttaaatttttaatgaaagagtaaggactcaagtaggtcaagtggcgacagttttatgtgtagcatatggaagtgccattaaatgaatgacctgtcttgaattgatagagcatctgtctttattcccattgctgccattccagataaagaacaaagcacatcaaagattgagaatatttttatttttaattcaaaaataaaagccagagaggcaacttaccatgttttcccaactttgaattcttatagcatactctttactgttctgtgctctgtgttgtgttaacattattgatttgaaggcatttgcattaaatttgaaatgttaaaatgtaaacaaaaatttagttgtaaataattataatatattgttaaaatccatagcagacactgttcctggatatttgctggaatggcagtggtagcaagtgttgtcttttctttctagttaatgcctagcttgttgcctggcactgaagagaaagtaaatatttgaacaagggaatgaatgaatgacagagggaaatggcgactgctttatgaaataacttgttaggttaattctaaggtatttatatttcatattcttttcttaaggctactgatgcccgaagggcttttccttgctgggatgagcctgctatcaaagcaacttttgatatctcattggttgttcctaaagacagagtagctttatcaaacatggtatgtatgtgtttataagtttatctaaaattttaataggctttagcagatttagtttgctgattagatgggataatatgaaaccacctaccacagtgctggtatattataggaacataaataatagttttctttattttcaataagcctctttttctttcttttttttttttttctgtagagttggggtctcattatgttgcccaggctggtctcaaactcctggggtcaatctgtcttcctgcctcagcctcccaaagtgctgggattagaggcatgagccaccatgcccagccaagacctctttttcttgatagctttatttttggaggattttgtccttgtcaaattccttgttaaatacatttataagattatctacttcttttaatttagagaggtaaattgacaagtttaatagatttatagtaactaaaagcaaaagtcttgggctggatatggtggcttacacctgtcatcccagcactttgggaagtcaaggtaggcagatcgcttgaggtcaggagttgaagaccagcctggccaacatggtgaaatcctgtccttactaaaaatacaaaaattatctgagtgtggttgcacacacctgtagtcccagctacttgggaggctgaggtgggaggatcacttgaacccaggaagcggaggttgtagtgagctgagatcacaccactgcactccagcctgggtgacagagccagaccctatctcagaaaaaaaaagaaaaaaaaaagaaaaaggtcttgacttattaaatgtcataagaaagccaggtacagtgactcttgcttgtaatctcagtgctttgggaggctaaggcaggaggattgcttgaggccaggagtttgacaccagtctgggcaacatagtgagacctcatttctacaaaagatttaaaacttaaaagttagccaggtatggtggcaggtgtctgtaatcctaactacttgggaggctaatgtgggaggatctctcgaacttaggagtttgaggctacagggagccatgattgcgccactgtattccagcctgggtgacagaacaagaccccatctcttaaaaaaaaaaaataggccaggcatggtggctcatacctgtaatcccagcacttcaggaggctgaggcaggtggatcatttgaggccaggagttcgagaccagcctggccaacatggtgaaaccccatctctactaaaaatacaaaaattagccagatatggtggcaggcacctgtaaccccagctacttgggaggctgaggcaggagaattgcttgaacctgggaggcggaggctgcagtgagttgagatcgcgccactccgctccagcctgggtgacagagcaagactccatctcggggggaaaaaaaaaaggttgcaacagagcaagaccctgtctctatctttttaaaaagttaaaagaattcaaaagatgtagctgcataatgaagtatatttaggtttctggctgtttgtattcttggaatgtattctcttcaccagtgttattgatctcattcatgaacagggtaagcattccccacttgaagtgtgttgtctaggactgtcttgtgtggggaacttggaaaaacctgctgcacctgaaaataactcttttatgtatttactgggggagagcatcccataaatagaatgtcattctcttcacacatattcttagaagaggaggctaatacattaagcagaaatattcattcacactttagtatgagtgaatttatcagtgtgttcttgaataagtcttccttggaaggaagaatagagagagcttgaggaaatggagcctgaataggaaaaagagggagaacaccaaaggaaattagggactccaaaggtaaagttgaaatttcttcacaaataagcttagagccaactttggtagagaatgccctcgatctagaagtttgtatcctttgaaatgggagattctacaattatattatattttttttatttatttttgagaaggagtctcgctgtgtcgcccaggctggagtgcagtggtgtgatcccagctcactgcaagctccgcctccctggttcacgccattctcctgcctcagcctcccaagtagctgggattacaggcaccccccaccatgcctggctaatgttttgtatttttagtagagacggggtttcaccatgttagccaggatggtcttgatctcctgaccttgtgattcgcccgcctaagcctcccaaagtgctgggattacaggcgtgagccaccgcgcctggcccctattttatttttattaatagtcattttctcctaaacttatgtcagttgaaaagtatgaagcccttacttaaatcatcccaatgcctggcttataataagtattcgagaaaagtccattcctcttttctctcacaggtccttggtagttttaacacttcagcctccagcttcttagtatgagtgttttatcagaccactttccttcttaaagacagcataaaagcactggatgaattggggtagagaaataagccatgctagaatagaaagggggaaagagatgcaataaagcctacagtttttggctggtatttgctctatggtattaatgtaaacctatttaaatttttcttttttttctttcttaaagaatgtaattgaccggaaaccataccctgatgatgaaaatttagtggaagtgaagtttgcccgcacacctgttacatctacatatctggtggcatttgttgtgggtgaatatgactttgtagaaacaaggtcaaaagatggtgtgtgtgtctgtgtttacactcctgttggcaaagcagaacaaggaaaatttgcattagaggtaaatgtacttgaagaggattgttccagcagtccataactccaggttggggaatttacatttctggtcaattattagtacagttatttataatttaatctgaaagttgtgctacttggtttatttttaatagaatttaggaaatgccaaccttggtgtttcgttattttacaaaataataattaagagaatataagagtggaatttctctagggaatgggttggaaaatatgtagttatatttttcatatcaagttataaatggattaaagtttggccattgtattcaaagtttggagctaaggcagtcttcggaggtagggctccctgggattcatttctagtaatttaagatacattggcttgcaacaggattcctttgtgggtttcaatatgaattataataacatatttattagatggttattttgtttatacttttataggttgctgctaaaaccttgcctttttataaggactacttcaatgttccttatcctctacctaaaattgatctcattgctattgcagactttgcagctggtaaagtaaatttcattttattgctgaattgtaataactttttaaaattttgtgacttttgatgcaagagtatatatatatatatatatatatatatctcaataaatgtttatatttattttgtgaaggtgccatggagaactgggaccttgttacttataggtatgttaatgatgtattaccctgccttatcttttcaaatcactgatttcaaaagggcttccctcctaatcacagttgagtagcttctgctttacgatatggtgtaaatttttctaccttcccccacttccatgcacatttcaagaatgcagatggacacctctccctttggtgctactgtctgagggtgtaagattttaaagtgagcatctggcggtagtagcatttttagatatattcttggctaagtttctcattgcagtgcctttctttcctgccagtagtttcatagctatttatccagcttggagaaccttccctaatttcatatcttctagccaagtttttacatgtctgtcaccacaacataaacatgtgagttgaataacttttaaaagcagagtctgtctgtaaacaagtttttgccttctactttcaattgccttcttagatgagctaagtgttgaacggccggctcagtgctgtttttgggactatggaatgcatcttcctccaccactcccctcatttaatgaaaggactttcttctctctccatctagcacagtaatcgctaatcccttagacaatgttttcccaaaatttcaggcagctattctatcaacaaactgataattaaacttgtgtcacatctttgatattctgttgtattaattctgttggggtagtctttaatcttcgtgaaactttttctttccatattaggaaatattttcctaatatctctaaagcctaacttgtccatctgacttactgtctgaatcttcccaacttatgcatgcccacttttattgtttaaatttgtttctcttttttttttttttaaacatagggagactgcattgcttattgatccaaaaaattcctgttcttcatcccgccagtgggttgctctggttgtgggacatgaacttgcccatcaatggtttggaaatcttgttactatggtatttaatatttttaagtgctcaaatatatttatcttcatcctactccacattattttggctacatagtatttcaagtttggctgcaacactgtgccaaaaaataattgagtgatagaaaagtattattttaaaaggtccactttgaaagggcttatcagaatctctgcattgaacaagggcatatggacagtctttattcaacagacacttcctaaactgttctaaaatttgtctgcaaatgggaaaagtcaagatactaatttgggtgagaggaaaagattcctcttaggtgtagatgaatgaatcatgcagtgagattccaggctaactgtagtttcttgaatcttatttgttaatctgactcacagctgaaaagtaacctgatgaataacagactgatctttaattagagagaaatgtttttaggagtcagttttttcattgcctaaaatgttaagttgaaatttaatgaaataaaagtaaacaaactgcagagtgactgcagaataaagctgtattaaaattccagctgttctgttgaaatccttataatgtttgcagtaatgatctctgtccttcagtcctgatttttcactcttactctaagtaaatactatttatgaatgccaactgtgttagagcttgggagcacaggatttaataagtgaactagatgtacctctgcaattaaataactggatattctggagccagctagattccctgacattttaggctgccaaagagcagaacctgatttgaatgtagattgagtccatacgttatataaataagaatgtaagacatttatcaactgttacgtgtctcagagagtttctacagaaagtcaacccttgaaaataaatcttttccttttattttggatgtttaaaattttacaggtgaaaaaaattctttgaaatataatttcaggccgggcacggtagctcacgccagtaatcccagcactttgggaggccgaggcgggtggatcacttgaggtcacgtgtttgagaccaccctgaccaatgttgcgaaactccatctccactaaaaaaaaaatagaaaattagctgggcgtggtggtatgcacctgtaatcctagctactctggaggttgaggcagaagaatcgcttgaacctgggaggcagaggttgcagtgagccgagatcacgccactgcactccagcctgggcaacaagagcgaaactccatctcaaaaaaaaaaaaaaaaagaaatataatttcatgtggaactatgtgttggtgcctgtattcaaatatgtgaagaaatggccttttcttctaatgcagcgagtttgctactttgtaccaaataatttttttgcttggctttgagataactttatgattttattttgaaactacaagcaataaattttagtaggggaaatgtgtacattcttattaaacaactttttactggttttatgtaactattctagttattagaactgaaattccaagggcttagggataggttggaaaataagtttcattttatgctagtttattttaggaagctactaggcaaatagccacttatcacttaatatcaaaataattttttttttaagacagagtctcactctgtcagttaaactggagtgcaatggcacaatcatggttcattacagtcttgacctctgggctcaagcaatcctcctgtctctgcctcctgagtagctgcaattacaggtgtgtggcaccatgcccagcttatttttgcactttttgtagagacaaggtttcactgtattgccttttgtagagacagggtttcactttgttgcctaaactggtctcaaactcctgggctcaagcaatcctcccacctcagcctcccaaagtgctgggattacaggcatgagctaccacacctggccttttctggggggactggttggggatggagaataggatctcactttgttacccaagccggagtgcagtggcacaatcatgggtcagtgcagcttcatcttcctgggcttatgtaatcctcttgcctcagcctcccaagtagctgggaccacaggtgtgtgtcaccatgaccagctaatttttttttactttttaatttttttagagatggagtctcactgtgttacccaggcttatctcaaactcctgggctcaagtgatcttcctgccttgacctcccagagtattggcattacaggagcaagccattgtgcctggcctgctttctttcactaataggcttaatcaactttaataaaatttagattaagatctttaaaattttttaaaaactgattttatctgtcactcatattctttgtccattccatttactatgcattcttatttaacaggtgataattttatattccataagtgcttaaacaccattcattactaaactacatttttgtttaatttcacataatttttatataagcagtactctttctcagtttctcttgaacattcaactcattagtgagtggttttccccagtcatttccatttttctttatttggctctgatagttttctgtttttgtttttcagagataatcctttactatactaaattctacgtgattatattttccacctctatttgcctatatttatctgctgtcttttccttttccatatatgggcttatttttttttttccctcttcttccttttctacctttggtatttaaaaagttacttaggactgagtgcactggcttacgtgtgtaatcccagcactttggcaggctgaggcgggaggattgcttgagccccggtgttcaaggctgcagtgagctacgatggtgcccctgccactccagcctgggcaacagaatgagaccctgtctgggtttgggggagaagttatttacaatgttttgaaaatatcctttggcccaggcatggtggctcacacctgtaatcccagcactttgggaggccgaggcaggtggatcacttgaggtcagaagtttgagaccagcctggccaacatggcaaaaccccatctctactaaaaatacaaaaattagccaggcatagtgatacatgcctgtaatcccagctactggtgaacactccagcctggtgacaaaacaagactttgtctcaaaaaaaaaaaaaaaaaaaaaaaaaaaaaaaaaaaaaaaagaaaggaaaagaaaatgaccctcagatataattctaatatcaccagttggcctttcttgacatctcttttagtcttctctctttttcagaaatgtgagttctttgcgaaatgttttgaactgaattttaggtcattaaattgtgagttttggaatatagtggaagggacatgtgagtgttttagattagtagaatgacaatcatttcaatttctttaagtattttcatcttctgtttttaggaatagtggactcatctttggttaaatgaaggttttgcatcctggattgaatatctgtgtgtagaccactgcttcccagagtatgatatttggactcagtttgtttctgctgattacacccgtgcccaggagcttgacgccttagataacagccatcctattgaagtgagccatactttctaaccattagcctatgactgctctcatttacaatgaaatacgtaatttgttacatagatactttggactttgaaaagaagagaaaatagcatgggtgattttactggttcatatttctagtcttgaaaagctagtaagtctaagttctaattaaacatttcttttaaaggtaggcagtaaaaaaaaattggtctggccaggcgcagtggcttacgcctgtaatcctagcattttgggaggctgaggcgggtggatcacctgaggtcgggagtttgagaccagcctgaccaacatggagaaaccccgtctttactaaaaatacaaaattagctgggcacggtggcgcatgcctgtaatcccagctactcgggaggctgaggcaggagaatcacttgaacctgggaggcagaggttgcggtgagccgagatcgtgccattgcactccagcctgggcaacaagagcaaaaaactctgccaaaaaaaagaaaaagagtagtatgggagaagtcatacctattgggtaacactatggttccattgtttatgtcaaggaaaattctggacatattttattgtcagggtctgttttgtgaatactttaattctcttgacttagcctatccctacttcagtttatatatataaattttgtatctaaagaactagagttataatcctacttcaacatatttaattaggctcccatataattgtaattcattacaattagtgcaagaaatctaatgttcttcacctccatgtcttcctcatcactcctctgcaactaccccaaaaataaacagaaccatagtggcttctttcccagcagaacaaagccaggactggaacccaagctctaagggatgacaggaatcatgttctattcaactttattattattagttactacatttttttgaggaccatcgttatacattatgagtgagttaaaggcagaaaaatgtaagttagaagggttttcctagaaagcgttttatgtaattcagtattacaggctatctgcttcctgtcataaccctgaatcacactgtctgccaggtcagtgtgggccatccatctgaggttgatgagatatgtgatgctatatcatatagcaaaggtgcatctgtcatccgaatgctgcatgactacattggggataaggtaaaaaaaaaaaactttaagtatttcattctttcatggtgaaatcataagagttttgcatgaaaaaaagtctcactttatttggattaagttcccaaatagtttctggcttgtcattttttttaatgaccaaaaagaatgagaattcaattatttgaagttgactactgtggtctcttagatgagtgatgtgcaggtgtgtttgggagtggaaatgggaggctgttataaaacttaagagcaagaatagaaggcatagagtacgcattattaaataaaaggcagtaggcatcagaaggatatatgtgtttcagtgtatctgatacttgagtatttgagtaaatttgtttttgattactaatatacaaatatactataaattctgagatctgacttccctggattttaaaaattgtgttttctcaggactttaagaaaggaatgaacatgtatttaaccaagttccaacaaaagaatgctgccgcaggtaatctttaatagcttgagatagaaatggagagaaagtattgtcactctatccaggctgggacattttatttttgttctgaatacttaactcaaggtcaggatccatgtaataaataaattagccttatttgaagctgtgttcaggttgaatatctctaatctgaaatttgaaatgctccagaatctgaaactttttcttttctttctttctttttttttaattaaagttctagggtgcatgtgcacaatgtgcaggtttgttacatcagtatacatgtgccatgttggtttgctgcacccattaactcgtcatttacattaggtatttctcctaatgctatccctcccccagccccctaccccatgacaggccctggtgtctgatgttccccgccctgtgttcaagtgttctcattgttcaattcccacccaaaatctgaaactttttgagtgccaacgtgatgctcaaaggaaatgctcattggaacattttagattttggatattgcaattatagatgctcagctagtaagtataatgcaaatattccaaaatccaaaagaaatatgaaattcaaaacatttctggtcccaagcattttggataagggacactcaacctgcagtaagtcatagggtcaacatgaatcaggactcattatccctttggtcatcctccagcattctgctttccataactgaatattttgccaacttaaagagtctgggccgggtgtggtggctcacgcctgtaatcctagcactttgggaggccaggatgtgaggactgattgagcccaggagttcaagaccagcttgcaacatagcgagaccccacctctacaaaaaatacaaaaatattagccgggtgtggtggtatgtgcctgtagtcccagctactcaggaggctgaagtgggaagggtcacttgagcccaggagtttgaggttacagtgagcaatcgtggcaccactgcactccagcctgggcaacagaacaagatcctgtctctgaaaaaataaaaaatcaagggaatagtcatgtgttgcttaacaacagggatatgttctgagaaatatgttgtcaggcaatttcatcaatatgtgaacatcatagaatgtacttacagaaacctacacagtatgtcctaggctatatacacctagcctacatggtatataccctgttgctcctaggctacaaaatacctgtacagcatgttactgtactgaataccataggcaattataacacaatagtatttgtatacctgaacatttctcaatatagaaaagttacagtaaaaatatgatattaaagatgctccatcagctggctgatatgcctataatccgagcactttgggaggctggggcaggtggactgcttgagtccaggagtttgataccagcctgggcaccatgccaatacctcgtctctataaaaagtacaaaaattagctgggtgtggtggcatgtgcctgtagtcccagctacttgggaggctgaggtaggaggatcatagtttcaaagtgtggcacttactggttctccactcactccctcctgccgtcttgtgaagaaggtgcctgcttccccttccccttctgccatgattgtaagtttccggaactgcaagtcaattaagcctgtttcctttataaattacccaatctcaggtatttctttacatcagtgtgaaaacaaatgaatacagtccccttccctgaggtgccttctccttaggcaaccagctgcccccatgctcctcttctgcccccctggtatttcctttcccctcatgaggcccaagtgatccacatggccagccacagccccatcctactgcaggcctgtgtggctgctagagaggccaggctcctttccgcaccccgaggctgcccgatatgctttctgcatcctgtagaaaactgacccactattctcatactggtgcaacttcttccattacctcaaaactggacaacgtgaacttgtttcttgtctcttcttgctagggctgtcactgggacagtccgagatgggggggtggggggagacaatggatgaatggatggatgaatggacagtagtccagggagatgtccctgtgtgtcctgaactgggaccttcctccaatgagaagccttcctgagtgagtttatacagtcatcccttggtatccatggattagttctagggtccccggggatgccaaaatccatggatcctcaagtctctgacataacatggcctagtatttacatatcagctatgcacatcctcccgtagacattagaccatctctggattattcatgatgtgtaatacaatgcagatgctacataaatggtcgtgatactggattctttagggaataatgacaagaacaaactctgcacatgttcaatagaaacataaccgtccaatttattttctgaatattttccatctgctgttgctgaatctacagatgcagagctcctggatacgagagccaagtgtgctttgagagtagggtgggtgaggttgctaatgagtacaggggagcaggtgttgatcaggaggaccctgcactggggcatctggacgtcctgcctcaggacttgagactccagttggatggcacaggcagactcagcccaggtcaaagccgtccccttgaagtttctttttatcccaagctctttctggcccctggaatttggcatcccctaggccctgtgtggaaggacagatgaaccaggttttagataacatgtctagaagagtgagcccctactgtgtgcccggcactttccccacaggatcctctagctagaatatccaagggtcatggagagaaatacccagttaaaatatcagaaatgaaaaagcgataccattagagacactaaaaagaccattaggtaatagtactagcttttgtattctgagatccaacagcagcagtcacttccctccaccgctatgtgtatcccaggaccaccctgggcagggagggctgaggttagggagcagccatggatgctctgatgctggccctgggcctcgggggtgacagtgatgaggaactgggtgcacacatgagtggggcagccgggcctggccagagaagcagcacacacgtgcacagatgtgtttacccacatacacatgtgcacgcacgtgcacaaacacattgcaggcaggcatgttgacgcctcaggcagcggaggaccctgactctgggtgctgctgacccgggcaaggccccactgtgattcgtgccatgacctcagaatgtcactggtgcttagcacctatctgctctctggtctgcctcagtggtctacagcagttacacacaggcagtggtatctgtgagcagctctgtggactcaaaggttttctccctgagaggcatgacccaggccagctgattcatcagaatcaggtgagcgtgacctgctctcttccctccaggcggacttgggggcagtggctacggtgcgggcggtgttggcctctgtggggcagctaccgaggagggtcatccctgagcactcaccaggcgcccgttctacactgcccgtgtagacgattggctctttcgtctccatggtggcttcgtagagtgggtgctgttcccaaatgtccccattcgacagatgagacgtctggggtcagagaggcagtaaccggcctgggaatccggacatgaccctgagttttgctctcagccctgccgtgtgctgtgctggaattcaggcctgaaccctgtgacctccctgccctagatcccaaatctgcccaggtttcccatcccgatggggcagagcctggtcctggcagagccactggtatagagccactggtacagatccactgacggtcctcagaacacctctgtgccctaagctgggtcctgatggtcgctgtgggccccactgaacacacatggtcccttgtccgggggagcctgctgcccttgggcagctgtggaaaatgaaggagccctggagggctggctgaggggagactatcttcccttgtgttcaaaggggtccgggcactagggttctccccaggtatttcttgctctgcgtggtcctcttgaggcctcgccctccttttgcctcgagtattcccaggagggacggtccatccagctgttctccaggaccaaggacccactgttcttcctcagtgacccaggaaaatgaagcctcctcctgttgggacggctcagaatggtggactccacagtccctccgcgagagacgtggtttccatgcgtacaatagatcttcctcatcccccaaacccaacaccctcctgctcaacaggcgttattcctaaagtggcttcactgttcagactgaagagccacggtagccaaagtgatgagcggagtagaaccgagcagtcgggagagatcttgttccctgtaggaaactgggcatcgctgaggccctgagcatcccaggaggccgattgcacagagacctctggtcgctgaccccagtctgcctccacatccctggaatagcccatcatgggcccttcacccttggcaggtggaaaccattcaacctgctggggccggtgtgtccccatttcatggcattgggggacaacaggattctctgtctaggtcccactgtactcaagtccttgggaagatgcccacccctgcttgggacttgagactccagagactggagcagctgtgggccactgggtctggcccctttttccctgggggcggcggtggaatgggggttacgcagccagccagcatctgggagcccggcgagagcggttcaggtgttctccgaagccgccgcgtacagtgtgacctttagacaattctgtctcacaggatggacgtggtagaggtcgcgggcagttggtgggcacaagagcgagaggacatcattatgaaatacgaaaaggtacaagtcggtctgcttcttggagggaggcctcttccagtgtgccctggtcaaagggtcctgggctccctaggagcacagggcagggacgggtggccaatgcccccaggcccttgcaccctttaccttggacccctcaccaaggctccctctgggctacagggacaccgagctgggctgccagaggacaaggggcctaagccttttcgaagctacaacaacaacgtcgatcatttggggattgtacagtgagtcctctgcactcccctcacccctaaagcacctgtctcagctcagggatgggtttgcttttagaaaggcctttctgacgcaggacatgtctcaccaggtcgggtcaacctcctttccagggacagaactcctccctgactcccctgcaggtccagcccgaggttgttaggccagaggtgtggggcccatctagggagccggtgggaatggagactgggctaggtcaggcccctgggcgctcagcagttctgtcggcaagtgagcacaagaggagcggggcagcctgagggtctggccctgtctacttggagacaaccccggtgagatgcaagggttatggccacagggtgaggggacgcctggcccagcctcagggctgttgtccagcaggtctctgagggcccacctgcccctgttctcccccattcccctagagctacagccctcactgtcccgtgaggggaaaaggcatggtgacaatgggggctgtagccctaggagaacgggggagaagatgggcagggccccgttctgggcatctcacggtgaggccagggaggcagcagggctcgcggctaaagacctgggtctggtgctgggaagggatctggggccaggtaagaggagcccagccaggagcccatccctcagggatcacaggatggagagacagaggatccctggggaggtagggcgggagggagctgacgagcggtgccacttctgaaacgcagggtgtgtggctcgggtgcagggagaggcaggtggatgctgggaggtcagaacctgcaagggccttggggctgtcaagtggggtgggcccctggtgcagccagagtacaccgggcaggtctcagggcaggctcccttgaccctggcggggggatgtggtcactccctgagggactcctgtcagggcccggtcgcccaccctgggcggcccccatcccatctcagggctaacctttctcagctccagcagaaagcaccacctcgagtccaggacgggcagccccattgggcagcctgaccgccccccacgccaggggccccagtaaccccggccaggctgtccctacactccttcttctcccaggtcctgcccctcctgggagtcagccccacaggaaggcccttgtcctcccttccctgtgccttctcctgggctgagccctgagctggaaagggacagagccagtcctttctgggggtcggcacccaggctggggccgctccaggccccgtgcagttcctcagctctgcctgggttgccttacagtgagacggagctgcctcctctgactgcgcgggaggcgaaggtaagagcctgatgcgtggaggggctggtccagggacgtagggactgggcgggtggtcagtgaggcagaggaagcagctggcctgagcggtggcgggtgagggcaacacgctgtcactgggaggggcagcagtccctgctggacctgaccccaggttgctgttcactttggcagtttgataaaattccaaaaggagaaccacagtcctggcttgggggtggctgcgcgcttgtgtcaggaccccacctagaggctgggacctaagactggtgtgtctgtggcctgaggatggtacatcccggggtcccaaagccagcccactggtgctcatttgctcaaaggctctcagcccttgaggtctgcccttccctggctccttccagctggctcccaccagggctccagagcccaagacccagcatctgcgggcggctctgggaagcctggcagctccgctaactccaacatgcctcatttgacagcaaattcggcgggagatcagccgaaagagcaagtgggtggatatgctgggagactgggagaaatacaaaagcagcagaaaggtaacgtgtggagggaggaagcactctctgcagagacaggggacaggcacccatggctgtggcctggcaccatcagcctctcagagggtgggcggcacactgtcctcgcccagaggactgcaggcctggtcgccagatttcctgcctattcgtgcaagcgtcaccttgcagggagggaatctgaatctagggctgggactacccggagctcaaggctagggatgccctggggacctgaaggaaggaaaaggttcagatcagagtttcgactctgagtgtccatccactctttcagtcctgggaagggagaccctgtcccagcttgatctcacctctactgaggaatcatggggccaaaaccgacaatttccagaatccccgggctctggtcctcactggggtcaccccgtggcctgtgacaccagatcgttttctgcccacagctcatagatcgagcgtacaagggaatgcccatgaacatccggggcccgatgtggtcagtcctcctgaacattgaggaaatgaagttgaaaaaccccggaagataccaggtacgctcagccagagcacaacaaacaggacaggccgtgtcggggcccaggtctccagctggagggaacgtcaagaccaccctggggagctgggggtgaaggtcagatgaacaccctgggcacagatggtgacacagtcaccacagacaaactcagctctggtgaccctccctggcttcagtaacaagccaaaatgcagctttctgcagaaggaaaccttccttctgtccttccttcccgaagtgctgactgtgggctgactgccactgggggcagggagtcttccatctgttctgagactgcttcctcctcttggccctgccctacagatcatgaaggagaagggcaagaggtcatctgagcacatccagcgcatcgaccgggacataagcgggacattaaggaagcatatgttcttcagggatcgatacggaaccaagtaagcctacgggagccacagggtcccagcagagatggggtgaatgagagggatgggggcttccccggagcagaagccagggtcacccaggagggatgacacagctgccaagagctctcccggcccagggagcagccggcaccatgaaccgagcacctccctggttccaagccctgggccagactggaacatgtggggccagaacccaggaggatcctgaggagatggaaggcagcaaacaaaatcatgcacaatggtgaagggtgctctccctgacccatggggacccatggtaggacccacgggagggtggcaggatagagggcccatgagccccccccaggcaacagtgacagcaccaaatgctgggagaattaggggtcctggaaactctcatccaggtccgctgggaacatgacatggcacagccacgttggcagccagttgggcagtggctcacaaagctcgatggacttgaaccacacatccccaaagtgtcacagatattgaacccactgatttgcaaactgacatccacatgaaaccagcatgccaggttcactgcttgactcctcgtcactcacacacggagccttcggggacggccttcaacacggggatggggagagcaaggctggtcctcccttcaaacggaagacccagtgagaaaagggaacgagccggtgatgcccgcacgaacgtgggtggatcctagatgcattttgctgagggacagaagccagacccaataagctaccacagtaggattcccattcctaggccattctggaaaaggccaaaccacagggactgagaagcagtctgggtggccaggggctgacggatcggggagaggctggttgcataggggccaccctggagacttggaggatgaaggagtcgccccaggaggggctggagcggtggccgggagactctgcacatcggtttggaaccgtggaggaactgtacacccacagactgaactggcgtgtgtgcaaactgaaaaaaaaaatcattcagagtgaaaaggatcaggcaagtcactgtacaactgggctatttgcatgtcacagatgtggattttactgaaacatttcttcaagagtctcaggccctgaagagctcactgcttatctggtgaaacatctgaacctgaaatgggatttgctgttaggctttgtagacaaagtgaaattaacaacatctgcacaaaacaaaccaaagccccctttctctgtttcctaggcagcgggaactactccacatcctcctggcatatgaggagtataacccggtgagtattcccggcagtgaggttcccgggccatatttccatattgacaggagtgggtgtctggtgggggtgtcgttgcttcttttaaagttagtatttgtgacccaccaggatataggaggtaggatgtcagctcaccgctggcataaacctccaaggaagggggtggtctcaaggggtcaagctgagacacaaaggagtcagggcccggactcctggtgtcacctgggcctgaccaccacttctcagaacaagaaatgacgccctcctcctggggctgccccaaagcccaggagcttggcagcatcgcacacaggatggtgctatcagcagacattttggacaaggtgctgaagtgcctgatggacttggctcttgtcatgaaatgaatgtgcatcctgaggaagcctctttttcagaggaagcctctccttcagaggaagcctctccagtcacctctgccctctccaatgacatgagtcctcccaggtgacctcagccctcccaggtgatgtccttccatggtgactctggctcttgcaggaggtgggctactgcagggacctgagccacatcgccgccttgttcctcctctatcttcctgaggaggatgcattctgggcactggtgcagctgctggccagtgagaggcactccctgcagggtaagtgaacagctgccccggggacctcctgcagccagacctggggatggccaccctggccaggtgatcacagctttcagccaaggcaccctccttgtgtcgccagcttgttgggagactttaggatgtctctgctgagggtcccacaggagtccacggctgacccccaaagcccaaatcagacgcctgtcatccccatcagcagagggcatctcatcctccccgtggccaccctctgtgtcctggagccacgccctccggctctgattctgtgcagctgactctcccctccctgagagtcctcctgccctccagctgcccgggctcctgctgccatcggtgcccacgaatgggccgaccaagcccaggtggcagcatctccccatcccctgttccctggcccgaccccactaccaggagatgaccgggaagcccagcgcccacccagttccggccaccctgtcgtggcctgaaagtcaggcttgccctttttgcaccctggcccaggaggcctccaggggaacctccagccaggctccagggaatgttcccgccccacctccccagggtaaaggccgcatgttggggtcaccagatgggagggtgggaggccttggggtttgggggcctctccagctgcccagctcttgcagctgatggctccacatcttgggggaaggctctgatttcatgatgggctgggggcttctcaggatttcacagcccaaatggcgggaccgtccaggggctccaagaccaacaggagcatgtggtagccacgtcacaacccaagaccatggggcatcaggtgagtttatggtcccctcagctcttcccagaggccctgcctcccgtggggctgtaggagcaggggggctggagcccctcgtggggctggtgactggctgagtcccagccagggcctgacctgggacgtcgggttctccatgggctgggagttggtttcctttcctgccctggaggagacagaggcacagggatgggggcccagctcccacagagcagggcaaagggcagtgtgtccaccgggagtgtgggaaggtgacagtgttgtggggagctctggacaccgcccagtgttctgcactaggggaagggtcttcagaggccctggaagagggaggtttttagggcagcccagtggcctgagcacctctgttgcttccatcaggacaagaaagatctatgtgggcagtgttccccgttaggctgcctcatccggatattgattgacggggtaaggaggcatagggagaccctggctcagggaccttccttgccctgcagtgccctgcttccccagcccgggggtctggctcactcccagcccacaggaggctcaggcgggtccccaaaggacacacaagcaaaaccctctgcccaaggggggtcatcccagggccatggctggggctcaggcccagcctcatgggcagactgggccaggacccgacttgagagggctcagggaagcctcaagccctgggcaagcccctctctccaggagccacatccccactcaaatgagtgccccccatgaggagcttcaagaccttgtctgacccagcgtcctggagggctcaggcgaccctcatggggaaggtcactgactctggagactgaagccccagtgtgcgcagctcgagccaccagccccagcctggaaggaccaggttctttcacacctgctgtccccacagatctctctcgggctcaccctgcgcctgtgggacgtgtatctggtagaaggcgaacaggcgttgatgccgataacaagaatcgcctttaaggttcagcagagtaagtctacgtgtgcccagcggggcctggggagccctggggtcagaccccgactggcccgagggcagcttcctcacactgtcctcatgatccgctgttctggcccagagggaggtctggccaggtgggctgggcaggacactgtgacactgagcccatcccccacatgacccagatgaaagtcgagagtgtggtgagcacttccctgtccggatcgccccccagccacagtctcctgtgtatatctggacacctggggtggccacaaaaggatccggcaccgcccagtaggagactgaagtggccacgggatatgagctgtgaccattcccaggtaactcccctggcctgatatccaccctgtccctagagcgcctcacgaagacgtccaggtgtggcccgtgggcacgtttttgcaaccggttcgttgatacctgggccagggatgaggacactgtgctcaagcatcttagggcctctatgaagaaactaacaagaaagcagggggacctgccacccccaggtgggctccagtgccatgtcccctcccatgtcaccctctggggtagtcagtagtaggggagtgcccgggacccgcaaccctactacctgggccttcctcttcaccttttcttcctcctcttcctcctggactctaagaaagtacaggaggcccaccggtcctcagggcaggcgctcagtgcgtgtatactggacatgctgtgcatgcaggagggggatgtgggcaagaccctccaacaagccccctcccactttccacggtgtctccctctccccctcgcagggccctccaagttactagacgagcccagacccatttgtgggagaccccgcccctccctgcaagcacccacagcctcagagagcagcagaggcccctcactcctgcacgctcctccaaggttgccaggacaagaagcctggagccagggagacaagggaatccgtgtccctgacccacagagcattcagggagagggcccagagccagagccaagagttcagccagaagtgggaacggtcagtcctggcatggactgggcagcccaggagggcagagggtgacccacgtccgggcccaatcacccactgcggagacgggtccccacgtgaggtgacaaggggctgggtgacatccaaggcccctcccacctgagttctgactgggggccgtatcccaggcccaacagccctgggacgaaggtgtgtggcaggaagcccccagccagtctgaaccctgggggcagtcccaggagccacccgccatgccacgacagcttccccacgccaggcagcatgcacccctccctctgggatcagcagactacaggcgtgtcctcggtgtcaggccacgggggccacacagagaccccgaggactccagagacgcaggcaggtggggcccagcccggaaaggcctgcgtgggctcactggagatgctgaccgcgtctgttttcctttcagccaaacccgagcaagggtcgtcggcatccaggcctgtgccggcttcacgtggcgggaagaccctctgcaagggggacaggcaggcccctccaggcccaccagcccggttcccgcggcccatttggtcagcttccccgccacgggcacctcgttcttccacaccctgtcctggtggggctgtccgggaagacacctaccctgtgggcactcagggtgtgcccagcccggccctggctcagggaggacctcagggttcctggagattcctgcagtggaactccatgccccgcctcccaacggacctggacgtagagggcccttggttccgccattatgatttcagacagagctgctgggtccgtgccatatcccaggaggaccagctggccccctgctggcaggctgaacaccctgcggagcgggtgagatcggctttcgctgcacccagcactgattccgaccagggcacccccttcagagctagggacgaacagcagtgtgctcccacctcagggccttgcctctgcggcctccacttggaaagttctcagttccctccaggcttctagaagcatctgggccagggctcatggctggataatttccctaggcttaacaacccaagcaagcttcgcatcctcgttttatttttggttaaacttatgaaaatgtattaagaaagagtgcagctcgagagagattcagagatggaacacaccagaccccagatcacaaagccaaccatgcccagcccctcccagcacccccagccccacgaccatcgttctgaattctgacgacaccgtgagcctgcctttgtacttcaaactcatggaaggataaccaccttcatgttttgaaataaatgtttcctgttgaaatgattttagattttagacagaaatattgaaaaggcactatagtatcctcctataccttccatccagctgcccctaataatgatgttttgcagtcccatggcacataagaaatttaggccgggtgtggtggctcacacctgtaatcccagcaatttgagaggtcgaggcgggaggttcaggttcacttgagtctagaagtctgagaccagcctgggaaacctaggtggacccggtctctagagaaaagtcaaagaaattagccaggcatggtggcgtgtgcctatagtcccacctagtcaggaggctgaggcaggaggattgctggagcccacgagttccaggaagcagtgagccatgattgcaccactgcactccagcctgggtgacagagtgagactttatctcttaaaaaaatttaagaaatttaatgtgggtacagttctattaactaaataataatgtgaactattatctaaggttatgaaggctagaattatcccatttttgcctaacttctcgtacctgtcccaagatcccaccttggactcaccctctgccttcagctcacgtctcttcagcttcctccacatggtccagcaaacacacacctgggctgaatggtagagctgattgctcatacacaaaggtagaccggtgggcagggattttcagacttacacagtcaatgagttttccttggtgttctggagagcaccgtttgagaaacactttgacagtgaatctaggcctcaagatccatcagctgctctagcttgaattttgctcaagctcagtgaacacctgctctgccgggtgcacgtgaaaggggcaaggatgagaaagctgtagataaagaagacaggacgcagggggtctgtctaagctctatcccctgccttcagcactgagggatgaaatccaactcttagggaacggtggccacgtgctgggccagccccaggctctcaggatctgacagtgggtgacgcagagccaggccttgcccctggggagctctccagcatacacctccctctcccctcccagcgtgccgcaaagcaggcgtcaacgccattgttaatgcacggaggaggaacctgactgttagacctgggttttccagggttgcacggcttctgggagacggatgtgaccctgaggacagggcacaggccagtgtaatgccaggatggaatgagctgtgatctgtgctgtatagaggcctaggccaaggtgggactgacggatgaccaggtcagccgggtcactgaaaacactcttgggtcctcacctgccggttcccaggagtccggaactgccaggagagtggtggcaggtcccccatcctcagctgggtgggcctggatagaacagcaaggcgagggcacatttccctggccattccctccaggcacagctgtgacctgttcattccaaatttgtggaagtatttccacacacacagaactgcaaatagcagtggacatggtgagaggcgtttgcacatgggataggcaggattttggaggcagagcctccagggcttgccgatgggttagctgcagggcttgagagggaacggagaatccaggatgatgtgttcaaatcggtccattcacctcttccgttccacgcctgtgctgggcactgggagagacagatgcacacaggagccccggccgaggggaggtgtggggggaagcccagagtgtctgggcagggtaggaaacccagagcgtctactgggagctgaaggcttaggtccacctgggtgccgtccaggttctctgcatgtagaagtataggctgagcttcctggaggaggagcagctgctgttgctggtgaccagcacattcaggaacggagactactctgtcaacagacagggggatgacctgaagtctggatggtctagggggtggtagggcccaggaggacccaggaaagggtctcggggatgcagaacatcctatggagggcatttgggagtcagtgctcaggtcactccgggtcacgcaggtcatttgccggcccctgtcataattattgccatatgagagtgccacctttcctgtgacataatttagacattcctgtgaatggcctacctgtttatatttacaacttcatgtttaaaggaaatttgtatcactctcataaatggaaagccagcaaaacataaattcaatgaaaacaaaatgaagtcaatgaactttagctagatactattccctgaccaaggcctgctggaggccgtacaaccggggtttgaattgagatctgccaagcttctgagtttattctgtttcccccacaccaaggatcctcaatactgcattactgacatcaggggccagacaattctttgcgatgggggctgtcctgcacctggcaggatgtttagcagcttctctggcctccacccactggaagccaggggaatgcagaagaggcttgcttattctcccatttaatgctcaggacaatatctgacatcaatgttacgtcttttattttataaatgaagacaatgagactcagaaaggtttaagtgagtcacctaagaacacacagacagcaagaggtagaacccgaaactgaacacaggtgtccacgagacaacaaaaaagttcaggttccagcttcctttgagtctctcatttcaacaatggccatcgtctgcatacgagctgaagtacaggaaagctgggctgaactctcttcccatcaggcctaggagccccagaccagaaccccagcccaagttctcccagtcaggcccgctggagggagctggcatctacactagcatggtttctcaaagctacagggatgccagtctcgctgctgatgaagaaaatgaagggcatttgcttctcctgcaggctgtcgggatttaacacagattccttttcttgctctcttctcccatagcacaaaactgggtggtccatccccctcccagtgtcccaaggctttgttgcgtgttctctttaatttctcccactctcgcagtgcaccctaccctcgtctccctggcaacctttctgctctatcctctcgccacctggatcacaagaacacttgtgagaccccttaacaagctacatcccaaattatcattcccctttgtcctcagccagtgcccgggtccaactcgctctcctggggtgactttctttcctgcccaatatggtttcatcatctgtaaattggggataattgaagtcttgatcctgatattgggctctgaaagcagaagtagcaagctcagccaagtcacttcaacaagaggagacgttccttgtgaaccaaaagggcactggtcacaagggccgctccttctctcaggcctctccagcacgcccttggctcagccaaagaagagactcaggctgtgcttctgtgctgtggggataacgtaggtacctggtccttgaccctgggactttaacagttccctcttgtggctcagttctacagcttcaatgacacaaagtggcttttgctcaaaatagcctttgataggttaaggtactcctctgccactctaagtctgtgtggaacagacagggttttgcttcacagagaagatgcataaaatttggtcttaaaaatgagttcaccatgcacacatacacacgaaaaaagtaaatactgcattactgtatatatgaggttccaaaataggcaaaactaatttatggtgacagaatagtggtgacctctgagggtcagtgttgactgggagagaacagaagagagcctactggggtgctggaaatgttctgtatcttaattttgcaggataattccttggatgcatccctaaaaattcagtcaagctatatagtaagatttgtgcagtttatgtaagtaataggagagataagagggggaacctgtggagaagcagaacatttcaagatctagaaagcaacagttgcaagggtacacagtgttcagacagggaccaaatcatagaaactactagggcttgccatgctgaaatgactgacttcaaaccatagggcatacgtaccttccactgaagaagagcacctgagtaaaatgactagaggtgcatttcaaagattattctatgggaaatataaagaacgaattggaggagtaggaggcaaatagtccaagggacagatacagatctttctttctcttttttttttttttttttttttttgagatagggtctccctctgtcaccctagctggagtgcatttctgcgatcatggctcactgcagcctctacttcctgcgctcatgcaatccttccatctcagcctcccaagtatctgggactccagatgtgcggaccacacctggctaatttttttattttgttgtagtaatgggaatctcactgttgtttcccaggctggtcttgaactcctgaactcaggcaatcttctggccttaacctctcaaagtgctgggattacaggtatgggctacagtgcctggccttattaaaatgttgatgtaataaatgggactacctagtgctgtgctttctccttaaaggagagagctgacagaataaaactagcagtaataatctggtaaattgtgctttctacagagtaaattttgtttgtctcatgacatttatgcaaatattcaaatgtttcaggaatataaacatttaaaatttgggttataaataatgcctcctggctctgaaattatctgaattcatgaagcaatcagtagtaaatatgaaggaaaaatgaaacacagccttatatgcaaggacaaacacaaatttctaattcttgttataatttgggtgcccacctggttttgaaggtgagccttggtttgactggttctgagacatttctctcaaatagcaaatgagtagtgggtatgaatagggtacattggaaagtcatgtcaaaattccatgtaatttttggagcgttttttctcccatatgatttatataatttgacatgtgtattcctatgtaaaatatttaaccacttctctacaataagcattaagtgggctaattagtatgctcttcttattccatatttctgtgatttctcttatctggaacgacttttttatgccacccaggctggagtgcagtggcacatttactgctcactgcagcctcaactccccagggtcaagccatcctcctatttcagcttccctagcagctaggactacaggtgtgcaccactatgccctgctaatttttgtgtttttttgtagagacggggttttgctatgttgccccggctggtcttgaactcctgagctcaagagatccacccaccgcaacctcccatagtgttgggattacaggcgtgagccactgcactcagcttcttttctaatttgtttttattctgagatcagatgagatcggcatgttcaggttggtatggccatagactgcttttatctattctaataattttgtattgtacaatgtgttggaaaggcaagatgaagttagattatgaagggttcatttccattcaattctgtctatccttctggactttgcctaaatcttaccttctttggagctttcctgaactaacttatctcctttgaattcttacatttggatcctttgtatttgagtatttttacatatatatgtacataaataacacgttttatgtgtagtaatttactctcccaactagattgaaagctgcttgaagagtaacctttttttaaagtcacattggaccgttttaagtacaaatttagcatatgcttgatgattgagagaaccatatggttacagtcattggtgtgtctatgattgtgatatgttgctatttaaaaatcaatagttatttcttatttagttttctgttaagccataaccttttgctctcatttatacatcttctgaacgttaagtaacatgtggctcatatttcaaactcccaatttggaagtttatagcaatgtaactgaagtttataattacaggtctcagaaaactgcactacacagaagttctctatgtgttagaagaatttattagaagatagacaattgtaggttacactgtaatttagaagacttttgcgcatctcatgtatttgtgtcagtttgagaatttgaaaatgcccccaaaatgtctgttcttcactagtgcctcttgtgatcctggcagagataagctaaacttttgaaagggtagactttttctgtttatcttagtatcctgagtccctaaatctggaatgtagtagatgtttgtgcatttccctatgtcagcgaagtcaaaatactagaggtggatttttcagcttttcaaagttttcacatttactaagtccttcacagttatcgcctactagttaaaaaactatttgcctcaatttaggccagtgctactttgacatttgcattgctgtaaaacccttactaaaaggtatatttttctggtatataaatacatgtatgcagcttttctcatatctttgagaaagcaaaaaattgtactaaattatgatttccactgtaataggattatggcttagtcatgatcagtattatgttttcagctatgtcttactaggattattgtaaaagactttcaaaatagttcatgtgaatctttgtctgatcttcacaaactcgggtatgtacatagctctcccccaccttctcctggctttggcaatttactttatttttatggtggttatatatatatatatataaaacataccatttaccatttgaactattttaaaaagtgtacaattagtggcatgaagtacattcacaatattgtataaccatcaccactgtccatttccagaacttgttcatcatcccaaacagaaattctctatcccttttcttccccagcccctggtaacctctattctactttctctttttatgaatttgcctattctagacacttcatggaaatagaatcaaacaatatttgacctttcttatttcacttaggataatgttttcaaggtttatccatgttgtagtacatagcagaatttaatttctttttttgactgaataatttgtatatactacatcttgtttatacatccatctgttgatgggacatatttgggttgtttccaccttttggctattgtgaataatgttgctgtgaacactggtgtgcaaatatctatctgagtcctgctttcacttcttttggatataaacctaggaatggaattgctgggtcatatggtaattctatatttaaccttttaaggaacagctaacctggtttccacggcttctgtaccattttatatttctaccagcaatgcacaagtgctccttccattttctccatatctacccaatacttgttattttctgttttctttcaattaataaccatcctaatgggtgtgacatagtattgtcattttgatttttagcttcctaatggctagtgctaatgagcatttttttatgtgctattggtcatttgtatgtcttttttggagaaatgtctgttcaatcctttgcccatttttgaattgagatgtgcgcttttttgttgttgagttgtagttctgtagttctttatacattctggatattattctcacatcagatatatgatttacaaatattttctcccaaatacttctgtgggttacagatatattaatatctgtagattgtctttcatggtcttgataggatcttttaatgcccaaaagtttttaattttgatgaaataatgtatgtagttttgaacttaaacaatgttacagattgcgcaaaggatataaccatgaaattctgatggagtgaccccacagctgcagaaaaccagaaagaaccctactctaaaacccaaaagacttccctagatagagtccttcgaaaataattttctaaattattcacacagcctgtggataaattaagaggaaatgatatctgtaacagtgctgcttgtgatgaaaacacagaagagtcaattatattatcaaatcttagctggaatggaaaatcaggaggatatttattagcaaacattaataaaaggttggcctttattattgtaagcatgtacacagacgacagcatgtagtctctaccataagaatgagaaatgcctcctatctttatgcattctgaaatttaacctttcttaacccaattgctgtaagggcctagggtttatttgttatgtgtgttattggagtagagactgtttgaaggttaagggggtatttagtgatgcaagtgacatttatatgttttaaaatcttctgcttttctaggcactttttaaaatgaaatgctatatttttaaacttttaaaaattatttttattattttttgcagagatgaggtcttgctgtgttgcccaagctgttctcaaactcttggcctcaagagatcctcctgccttggcctcccaaagtgctgggattacaggcgtgaaccacgtgcctggcccaaactttttaaagactttatttctggaggcaggttctcaaaagatatcctatcttaatgggcatatatagagagagagtagtaggtgagtttaagggggatgtaaatattggccgaaagaggtttcttttaggtatataacccctcaaatgtagccctttggatatcaaaagtttattatggcaatgttctttgtgcatttttattcgatgttgtcagccattcatctaataactcttcagaagattttgtctctgggcagtggcattttataacttcctatatggaagaaaacttttatccaactgataactgatatgccaatgtgttagtatgaaaaaattttcccaacattcttaccaggtgtggtggctcaacctgtaatcccagcactttgggaggtggagtcgggcggatcacttgaagtcaggagttcgagaccagcctggccaacatggtgaaaccctgtctactaaaaatacaaaaattagctgggcgtgatggcaggcacctgtaatcccagctacctgggaggctaaggcaggagaattgcttgaatctgggaggtggaggttgcaatgagccaagatttcctcactgcactctagcctgagcgacagagtgagactctgtctcaaaaaaaaaagaaaaggaaaaaaaaagaaaatttcccaaaattcaaatgtcgtttcactgcgtggctttgtttgattattaatactttaatactgtgtttaaaattaatatttattatttttaaaaatcagcttccttaggtcaaagaaacattaatgtttaatattaagctattattgtagcttagtgtagttataataagatactggaactcatggaaggggttagattttcttcatcttagaaaccgttacttttcataaagtatatattgtgcaattatatataaaattatataataattagatatacaaataaaaaatcggattatagttgggctcagtggctcgcatttgtaatctcagctccttgggaagcttagactggaggatttcttgagtccagaaatttgaggctgcagtgagccatgattgtgccactgcattccagactgggcgacaggaatgagaccccgtctctaaaaataaaaactaaaaaaaaatagattatgattggcaaaagattgagtgacagtgaaaatgcaatgaatattttgactactattttttgattacatacataggaagatacgaatttttctgtctttccaaattagtttagaaattaaagatttggccgggcatagtggctcacccctgtaatctgagcactttgggaggctgagataggcagatcacctgaggtcaagagtttgagaccaccctggccaacatggtgaaacctcgtctctactaaaaatacaataaaaattagctgggcatggtggcatgcacctgtagtcccagctacttggggagactgaagcaggagaatcacttgaacccaggaggcggaggttgcagtgagccaagatcgtgccactgcactccagcctgggcgacagagcgagactctgtctcaaaaacaaacaaacaacaacaaaacaccagaaaaaggaaaaatagtgttaagagataacttagtatgtattgtttgtacacttcatgggtgtgcatatatgacgtgtttggttttatagtgaaaattctaacattctgctgtatggtttatggtgcattgtagacgttcctttaagcactcaatgataaagattaaaattactaagatagagagtaaatctatgttatatgtagtcatttctcagtttgcatagtagtatgggactgtaaaaatgaccatgcaagctaagactattcaaagggatcacagtaatcagtggaaaaaattgtgattgttctgttggacctttaaaaatttttgtcaaaacattaaaaactctctcacagttggttatagatatacagggtaagaagaagcgtggtatccacagagaaggagggagcttcataaacaaagacaaacaggaatatcaactaccagccaccaacagcactcttgtaaaacttatttaaatattacaaaaaacaatatacaagattactaagagattggaagataaagggagaaaatttcactaatgatctcatcaccaaacacagttaattatttgctgttactcttttatcaaattagtgtttagtattgttttaatcataatgtacatacaattttgtatcttgctttttctgagatgtctgtttctgtccatgttatacatacctatacagtcctgtgctgcatgatgatgttttggttaacgatggactgcatacacaactgtgatcccataagataatagtagagctgaaaaattcctattgcctagtgacattgtagccatttacttgtttttgctttctgctttttttatgtagtcatttactatactaaacctttaatcattattttagagtatactcctatttatttagaaaggtcccccaagggaggacagaaaacactcataatttaatgttattgtccttttcacacatatgtagctatatctattatattttattttactttattttattttaatttttgagacagagtttcactctgtcacccaggctggagtgcaatggtgcagtctcagctcactgtgacctccacctcccaggttcacgcaattcttctgcctcagcctcccgagtagctgggattacagatgtgcaccaccatgcctagctaatttttgtatttttagtacagacgaggtttcaccatgttggccaggctggtcttgaactcctgacctcaggtgatccacctgccccagcctcccaaagtgccgggattacagcacttttacagcatgagctgccatgcccagcctattttattttattttgttttattttattagagacagtcttgctctgtccccaagcctggagtgcagtggcgtgatcgtagctcacttggctaatttttaaactttttgtagatatggggtctgggtatgttgcccagcctgatcttgaactcctaggcttaagtgatcctcctgccctgacctcccaaagtgctgggattacaggcgtgagccatcctgcccagcctgtatctattatataagctggtttttttgattactttaatgtaaatgagattataccatactctcttctctgtcacttcctattttcatgtaatttatgttagacatctgtcaatgtcagtataaataggtctagatcattttttatagttgtatacctttcgttacatggatgtttcacaatttacttagctaactacctattgttggacatttggttatttccaaatttttgctgttttatataatgctgcgcttatataaaatatagttctatataattatgtttaattatgtactaccgctgtatctgacaactgacttgtatcaagaacatacaaagaactgttacaagttgccaggcagagtggctcatgtctgcaatcccagggctttgggaggccaaggtgggcggatctcttgagcccaggagttggagaccagcctgggcaacatggggagaccccgtctcgacaaaaatacaaaaattagccaggcataggggcacacatctgtagttccagctacttagaggctgaggtgggaagactgcttgagcccaggaagttgaggctgcagtgagccaagatgacaccacggcactccagccagcgcgtcaaaggccctgtctcaaaaaaaaggaagaagcgggggcggcaaataagtagagtataagccacctcatccaactttattggaaccagtagttgactggttaatcagtccaagcaaggaagcataaaaactgatgcatgtgccgggcatggtggctcacgcccgcaatccccgcactttgtgagaccgaggcgggccgatcacctgaggttaggagttcgagaccagcctggccaacatggtgaaaccctgtctctactaaaaatacaaaagttagccatgcatggtagtacacgtctgtaatcacagctactcaggaggctgaggcaaaaaaaggagaagaaatgctatgtgaagcctttttataagcacattaatttcattcacgagggcagagcactcatgacctaatcaccaccttgaaagcctcacttcttaacatcatcacattaggtcttaggttataacatgaattttggaggactccagaaaaaaaaagtgaaagacaacccacagaatgggagaaaatacttgcaaattatgtacaaagtaggatcactttatttgtggaaaatatgtagccagacacagtggctcatgcctgtaatcccagaactttggaaagctgaggtgggaggatcacttgagcccaggagctcaagactaacctgggcaacatagggataccttatctctacaataaataaataaaattacccagatgtggtgacatgtgcctgtggtcccagctacttgggaggttgaggtgggagaatcacgtgagcccaggaggttgaggctgcagtgagccaagataacattaatgtatcccagcctgggcgatagaccgagaccttatctcaaaaaaaaaaaaaaatatatatatatatgtatatatttatctattacctatatattcatatatagatatagattaatatagatatataaacatatatttatagatatatagatacataaatatatagctatatataaatatatatttataaatatatagatatatatgtaacaaaatatgttccaagacctccagtgtatacctgaaactgcagatagtaccaaactctatatgtactatgtttttttcctatacatacatacatacctatgatgaagtttaatttataaattaggcactgtaatagaataacaacaataactaataataaaagagaacaattagaatatactttttgtttttgagatggagtcttgctctgtcacccaggctggagtgccatggcgccatctcggctcactgcaacttccacctcccaggttcaagcgattctcctgcctcagcctcccgagtagctgggcctacaggcacctgccaccacgcccggctaatttttgtatctttagtagaggcagagtttcaccatattggccaggctggtctccaattcctgaccttgtgatccacccacctcggcctcccaaagtgctgggattacaggtgtgagccactgtgcctggctagaatatactttaacataagttacatgaatagttttctctgtctcaaaatactgtaatatttgggattgcagctgcccgcaggtaactgaaactgcagagagcatacgggagactacagtatctgacaatggacttggatctagaatacataaagaactcttacaacttgataataaaaaggatataacccaattttaaaatggacaaaagatctgaacagatatttctccaaagaagacatacaaatggccaataagggccaggtggtggcttatgcctataatcccaacactttgggaggccaaggcaggtggatcacttgaggccagaagttcaagaccagtctggccaacatggcgaaaacccatctctactaaaaatataaaaatcagccaggcgttgtggcgcatgcctgtagtcccaggtactcaggcagatgaggcacaagaatcactcgaacccgggaggcagaggttgcaatgagctaagattgcaccactgcactccagcctgggcaacagagcaaaaccccacctaaaaataaataaataaataaaaataaaaaaaagaaaataaatggccaataagcacaagaaaatacactcaatttctgtcttagtctgtttgtgctgctgtaacaaaatacctgagactaagtaatttataagtaaaaaaatttattcctcacagttccggaggctgggaaaaccaaaatcaaggtgatagcacatttggcatttggtgagggcctgttccattgttcccgttctcgcagtggcatcttcacatggcaggagaagaaaggaaaaaagaagaagaaatgttatgtgaagcctttttataagggcattaatttcattcacgagggcagagccctcatgacctaatcaccaccttgaaggcctcacttcttaacattgtcacattaggtcttaggttataacatgaattttggaggactccaacattcaaaccatagaaacatcattagccatcagggaagtgcaaatccaaaccatgttaagataccacttcacactcacaagaatggctataataaacagacacataataacaagtgttggagaaaatgtggaaaaattgaaacactcatatgttgctggagggaatgtaaaatgctttgcaatgaagttggaactgctttggaaatagtctggcagttcctccaaagcttaaacatagagttatcatatgacctggcaatgccaggcttcatcatattcccaagggaaaggaaaacatatgtccacacaaaaacttacacatgaatgttcatagcagcattattcataatagtcaaaaagtggagacagctgggtgtggtggctcccaacactttgggaggccaaggcgggaggattgcttgaggtcaggagttcgagaccagcctggccaacagagtgaaatccgatctctactgaaaatacaaaaatcagcgggacatggtatacgtgcctgtaatcccagctacttgggaggctgaggcaggtgaatggcttgaatccaggaggcggaggccgcagtgagccaagatcacaccaccgtactccagcctgagtgacagactgagactccatctcaaaaaaaaaaaaaaaaaaagtgataaacagataaatgaaatgtgttatattcctacaacagaatattattgagccataaaaaaaaaggaaataagtactgacacatgctataacatgaatgaaccttgaaaacattaggttacttgaaaaaagccagtcacaaaagatcacaaattgtatggttccatttatatgaaatgtccaaataggcaaatcctatcctaaaagaaagtaaattagtggttgcctaggactgagggatggagaaaatggggagtgagtgctcataggtatggtattttttttttgagagaaatgaaaatattctaaaattgattgtggtggccaggcacaggggctcacgcctgtaatcccagcactttgagaggccgaggcgggcggatcacctgaggtcgggagttcgagactagcctgaccaacatggagaaaccccgtctctactaaaaatacaaaattagccgggcatggtggtgcatacctgtaatcccagctactcgggaggctgaggcaggagaatcgcttgaaccagggaggtggaggttgcagtgagctgagatcgtgccactgcactccagcctggcgagagagtgaggctccatctcataaaaaaaaaaaaaaaagaaagaaaaaaaagaaaaaaaagaatgtttcaggcaaagggaagagaagtgcaatggtgctatttcaggcagaagcttgtcaggtttgctgtggtgtggtagtgtggaaggactcagtgggaaggaaaagaaatgagggcacagtagtgggcagggccaagataaagccatatgcatactgctacattttttccttgtccaatatatttcattaaatgtagacaaaacttattataaagacataacttttgatgtttgtaaggtcatctgttatttgcactcctttttttttttgagatagggtctcactctgtcacccaggctggagtgcagtgttgccaccacagctcacagcagcctcgacctcctgggctcaagcactcctcccaccttagcctcctgagtatctgggactacaggcacatgccaccgtgccccactaattttttattttttgtaaagacagggtttctccatgttacccaggctggtctcaaactcttgagctcaaacaatctacccaccttggtctcccaaagagctaagattacaggcgtgagccactgtgcctggcttgttatttgcatttgtgattttaaaattccatgttttttatcataagattgtcaggtgctttctggacaggaaatgccttaatttatgactcaaaatacaaacaagtgtaggtgatcaaatgcatatctatgtcttcaatggaaatatatatacatacaagtcattaacgaagacaaatgagaacatgaaattcatgacctattttcctttccatcacctagccccctaaaggagagatctttttcattcagagccctgggttttgttttgtttcatgatttgcttttttttttttaaaataagagtttatttatttatttatttgagacaaggtttcactcccatcagccaggctggagtgcaatggcgtgatctcagttcactgcaacttctgcctcctggactcaagtgactctcttgcctcagcctcctgagtagctgggactacaggcacgtgccgctgcatccagctaattttttgtagagacagggtttcaccgtgttggccaggctggtcttgaactcctgagttcaagcgatccgtctgcctctgagtctcaaagtgctagggttacaggaatgagccgccgcgtggccaaaagagtttattttttaaagaaaattgacttctttgaaaacgtagaaatgaggccgggcgcagtggctcacacctgtaattccagcactttgtgaggccgaggcaggtagatcgcttgaactgaagagtttgagaccaatctggccaacatggtgaaaccccatctctactaaaaatacaaacattagccgggtgtggtggcaggtgcctgtaatcccagctactcgggaggctgaggcaggagaatcgcttgaacccgggaggcggaggttgcagtgagccaagattgcgccattgcactccagcctgggcaacaagagcaaaactccatctcaaaaagaaaagaaaaagtagaaatgaggaagcggccagcctgtgtggggatctaatcaaacaaatcttcccctgatgagggtagcacttaagttgaaaaaaatttgcctatataataaatattgcaatactttatttatttatttatttatttttcgagatgagggtctcgctgtgttgcccaggctagtcttgaactcttgggctcaagggcttctcctgcctcagcctccccagtggctgggctaataggcacacaccaccatgcccagctctacatactgattttttttttttgagatggagtcttcgctctgtcgcccaggctggagtgcagtggcgcgatctccgctcactgcaagctccgcctcccgcgttcacgccattctcctgcctcagcctcccgagtagctgggactacaggcgcctgccactgcgcccactaattttttgtatttttagtagagacggggtttcaccgtgttaaccaggatggtctcgctctgctgacctcgtgatccgcccgcctcgacctcccaaggtgctgggattacaggcgtgagccaccgcgcccggcccatactgattttgaaatttaaaaaatctacattctatattcgcatcatagcttctccctaataaaatctttgtgagtgtttatgggacttattccccgaaaaatctgcaagcagcctggtagctttatatacacaggaaagccaaaggacaaactaggaattacgtcagagatggggaaagactaaggatcttacccaaatcagttgagaatcagccttaagtataaatgggccaggtgttggtggctcacacctgtaatcctagcactttgggaggccaaggcgggcagatcacttgaggtcaggagttcgagaccaccctggccaacatggtgaaaccccgtctctactaaaagtaccaaaattagccaggcgtggtggcacgtgcctgtggtcccagctacttgggaggctgaggcaggagaatcgcttgaacctgggaggcagaggttgcagtgagctgagatcacgccactgcactccagcctgggtgacagagtaagactccgtctcaaaaaaaaaaaaaaaagtataaatgaagcacaattaacatttgttaattttataaagcaaaagttcataaaaataaatattctaattaactctcctacatcttataaacactattaccaaacccatttaagattgaagataaattatatcatggcatgggtaaagattttcaataaggagttgctaggataaaagtcaaaattctccagcataaattcactgacagggatttctgtttaatcttttcaaaattctaatacccaatttgtttcctctagagaataactcgtgtagaatcataacctctttggtggaccttgatttttccatctgtaaaagtatagaactagttttgacttaacagtcaacaaatgcctaccctctccacatctagctgattagagcgccctcatgtgcgcatttgctgtaatgttttagaaatctgaaaaagacaatattaatctcagcagtaatacaataaataatgtcttcatttgcacatttatagcaaatgctataaatatatagctccaagtattactcagtaaaagctaaaggcaaatgctgtagtaggttaatcttactgtcgttcactatcaaacctttcatatgccaattttatcctaaaacagtgaagttattgttttggtttcaattttaatttaatgacttaaaggattttttcccttaaaacttctaagtatttcattataatattatttcatcattaggcttaaaggaaaatatgtggtcaattgagttgttatttattatacatgatagcttgacatcatctttttagggatggaaaacagctccagggaccaagtctaactcagttttttgatataagaatttacctgtcggccgggcgcaatggctcacacctgtaatcccagcactttgggaggccgaggcgggcggatataggtcagcagatcaagaccaggagttcaagaccagcctggccaagatggtgaaaccccatctgtactaaaactacaaaaattagccaggcgtgatggcaggcacctgtaatcccacctacttgggaggctgaggcaggagaatcacttgaacccggttcaagtgagccggctgcagtgagccaagatcacgccactgcactccagcctgggcaataagagcaagactccatctcaaaaaaaaaaaaaaaaaagaatttactagtttgaatcataacaatttcttcctactcaaagagactacattggaggaagccaaaacagaagcttatttatttatttatatactttatttatttatttttgagacagagtcttgctctgtcacccaggctggagtacagtggtgtgatcttggctcactgcaacatctgcctcccgggttcaagcgattctcctgcctcagcctccctagtagctgggattacaggtgtgtgccaccacggccagctaatttttgtatttttagtagagacgggttttcaccatgttggccaggctggtctcaaactcctgacctcaggtgatccacctgcctcagcctcccaaagtgctgggattacaggcatgagccaccaagcccagcttagagaagcttattttttaaaagaaaatacacaaaaaaatcaaaatctcataagtccaattgtaatttttttttggcttttaaaaattgttaatgccctcaaatattctcctatccaatcactgtattttaaatggcattcctccagcaaatatttgttgagcccccactatgtgccaggattgaaatgtcaaattgaaggaggcaatagctactgaagtaaagcaaaaaaaagtactggttatttttccttctataaaatgacctagtaataaccgctttacccaggagagttgctgtaaagatctaataacatgacacatataaccacacccctaaagaatgaggtgttaccgcatgttctcactcataggtgggaattgaacaatgagaacacatggacacaggaaggggaacatcacactctggggactgttgcggggtgtggggaggggggagggatagcattaggagatatacctaatgctaaatgacgagttaatgggtgcagcacaccagcatggcacatgtatacatatgtaactaacctgcacattgtgcacatgtaccctacaacttaaagtgtaataataataaaataataaaataaaaaaaagaaattttgcttaaataaatattataataaaaaaaacaaatgaggtgttattaaaatgtttgcaagagaaaccctagtaattccaagcacatattttaggaatggtttcttgtgtagaaaatcctggaatgtgaggctctgctgatttttttaatgcatattctcttcttatgtatgcggaattttttttttttttgagatagagccttgctctgttgcccaggctggaatgcactggcacaatcttggctcactgcaactgccacctcctggtttcaagtgattctcctgcctcagcctcccgagtagatggaattacaggcgtgtgccaccgcacttggctaatatttgtatttttagtagagatggggtttcaccatattggccaggctgttctagaactcctgaccttgtgatccacccacttcagcctcccaaagtgctgggattacaggtatgagccactgcacctggcctatttttgtttttactaatgtttcaagagacccactttatgtacagaattctggctacaacctaacaaatgagttgctctgttcatcagttatagccaatttaagtaattatgaaaagctcaacaatacttttaactggcaacgaaagcgtcaatagctcacatttaccaccacaacttaggatttcttggtagctaaataaaatgcttctattttgtggggggaaactgtcacataagttgaaattctgcaatgttcaattgatgaaaaggtctctatgttaaatcaaaggtataaattccacatcagtagtacatgaaagagaaaaaaaaagccaaaattaaagtgattcatgcccacttccctgagtgaacctaagattttactaacagagatgccgtaactttgatcatgcacacatcaaacttgaatttaaaaacatgcatgcactcactcatcttttatctcttatgtaattaatactgtaagattatattttgcctacgtgctctatattactaatttataggattattactattcagtgttgtttacttgaaaccatactgtactatacacaacttttgcattccatgctaactttatttttttaattattttttttttatacagagtctcactcactctattgcccaggctggagtgcagtggcacgatcttggctcctgcaacctctgcctctcgggttcaagtcattctcctacctcagcctcccaagtagttggtaccacaggtacatgccaccacacccggctaatttttgtatttttggtagagatggggtttcaccatgtgggccaggctggtctcgaactcctgacctcaaggttataggcctgagccaccatgtcccagctccatgctaactttagagcttatttcccatcccataagatacaacactacttgtgttatatagtgagcagtgtggggaagaaaagcatagaattaagttagtgacaaatccagtgaactcaaaaagagggaaaaaaacactcccaaacaattgttttccccatattctattctccctagaggtattccatacaggaacgacaaaagaaaaaaaaggatacaaaatgagaaagatgttcatgtgacatataagtacagtaataaaatcaacaagcatatatggtatttaagcaaaatagtatgtatgcattgatggtcatctgatataaatccatcatttctgttggccaacatctaaaacctttacttttctgaggagacaagctataaatctatacggatatttctacaacaagaattcactattacatatgaaccaatataatttgatgtcaaatattcacaattaggtttaaaaaatcccctacttggccgggcgcagtggctcatgcctgtaatcccagcactttgggaggccaaggcgggtggatcatgaggtcaagaaatcaagaccatcctggccaacatggtgaagccctgtctctactaaaaatacaaaaattaactgggcgtggtggcaggcacctgtagtcccagctactcaggaggctgaggcaggagaatcacttgaacccaggaggcagaggttgcagtgagctgagatcgcgccactgcaccccagcctgatgacagagtgagactcagtctcaaaaaaaaaaaaaaaatcccctacttatgttaagagtaccaaaaatagggccaggaatgatggctcatgcctataattttggcactttgggaagccgaggtgggaagatagcttgagtccaggagtaaaatagtgggactctgtctctacaaaaaaataaaaaattagctggatggggcacacacctgtagtccaggtactcacgaggctgaaatgggtggatcacttgagcctgggaggtcaaggctgtagtgaactgtgatcacaccactacaccctacacccagcctgggctacaaggtgagaccctgtctcaaaaaaaaaaaaaaaaaaggtaccaaaaatctatagctgtttcagaaataaaatacatgtagttagtgaggtttttctctcccactgctatgacttaatttttggttgagatgctaagccaaacatcattttaagtctgtggcccaaccaaaaaagggaatcatactctccaaagaattgtacattcccactctaattgctaaaataaaatgttggattatgaaaatcaattttgtaggtatcaataatttataagagcatggcttatttaaaaaaaaaagtgggccaggttacctacatgagctgcaaagcaagcaaactgaattttcttatcgaagagcccatcctcatacttaaaatttcccatgactacatggaaattctttcacttaccaaaaacacctgattggcactttcactgagagttgtgtcatctgggctgtcgacaggtgtctgacgtgtaaacttggaatcaaactgacttacatcctcttcagattgctctatacaaacaaaataatttagaaaataatgaatagtccatatgacatcaatcaaatgcactgtaagctctgggagctcttttcgcaggggttaactataataaagtattagaatagtcttagcaggcactattctaatagtggagaaatgcaagtggaagaaaaaaatgcaagtggaaagtactgagtcaaattacatcttcaaatcttaaacatgcactaaaaaagattttagtatactgttattcctattaaaaatgtgaatatattggctgggcatggtggctcaggcctgtaatcccagcactttgggaggctgaggcaggcagatcatgaggtcaggagttcaagaccagcctggccaataaagcgaaaccccgtctctactaaaaatacaaaacatcagccgggcgtggtggcgggcgcctgtaatcctagctactcgggaggctgaggcaggagaattgcttgaacctgggaggcagaggttgccgcaagcagagatcgtgccactgcacaccagcccaggtgacggtgcgagagtctgtctcaatgaaaaaaaaaaaaaaaaaagaatatatcgagctcaaaacaagctggaaaaaatgtgaatatcaatttcccctctcacaaagcttcagtgtgcctagtccactggctaaatccctgtttagagataattaattcagttggctactgcaggtttgtaataaacctgaaaaactactgaagcagagttaaaacatgaataatactggtaagatgctccagttaaagtttcttcccacagctcatttcattccttcagaaatctaaaggagcaaaaataattttctattccgcatgggttataagttatatttccttgtgaaagtatagttatcacttcagttctaaccatgagatttatttatttaattccttctctctttcccaaaatatctggttaaactcttgggccaaatgtaagaagtaaataataatttagaatatctgacttaatactaaaagatgatgaccacattgaccttataattctcttagagcccagactgtgaacctgcactccctggaggaatggctgattccaagtgtggggaaaatgtacaagataagcatagaacaccagtttccttattttgctctctcgtacaacaccagacaatgtgctcatgtcaaaaggactcagaacccaacatgaagatgcacccagcattcactgcacccagcattcaacgaagggaaaaaacgagcaccaataaaaataactgctaggtgcggtggctcacgcctatcatctcaacactttgggaggcagaggcaggtggattacttttgagctcaggatttgaagaccagcctggtgaacacggcaaaaccccgtctctaccagaaacacaaaaattagctgggcatgatggtgtacctgtggtcccagctactcaagagggtgaggtgggaggattgctggaggtcaggacgtcaagcctgcagtgggcagcgattataccactgcactacagcttgggtgacagagttaagaccctgcctgaaaacaataaatgaataaataaaaataaaataaaaataactgcgatgaaaggaaacacaaatatgttaaaacgtgtaagttcataatatactaaaaaagaaaaaaacacacacaaagttcattggtcaattttggaagatgctagggaactaattcattattttgaaaactaggaaagaatcaaacatacatcctgccttttctgtatgaactgtaccttgggtaactaactgatcaaagagtttctctttatgaaagaattccagctaacaaagaaagaagaaataacagttagaataaaaccatttcacaaacacctgatgaaactacaaaagtaggccagagtttctcaacctcagggctactgacattttaggcctattaatactttgcgttagggggctgtgctgtgctgtgctgactcttacccctgaaggtacctatagcattccctctcccaagctgtgacaatcagtgtgtctccagacattgccaaattaccctggtagtgaaatgctgacacaggcagtgaccactaacatcactaaaaaaacacacatacgcacacacaagtacacattatgcctcctgatcaaagcatatgcgatactgagagtgtaatctgaatcagatcaaccacctaaatttaactaccagtttttggaaatttggggaacagatgaacatggtcaatgacactctggggataatatcagcaaaatcaaaatttgagaattctacaggacaaatgaccccgtttcttcagtaaatcacgaggggaatctataaaggaaaagagacctaagagacatagtaaccaaactacatacagaccttgattaaatccttacaaacaggagaaaaaaaaaaaaagaatggaacaacaacaacaaaaaaattaggtggggcaacacagggagacctcatctctagaaaaattcaaaaaattggatgtggtgatgcacccctgtggtcccagctatatgggaggatcccttgagcctgggaagatgaggctgccatgagccactatcatgccgctgcactccagcctgggcaacagagaaagaccctatctcaaaaaaaaaagagaaaaaaaaaactggggaaactgtcaacttcttaggtgtgatgatgggatgacagttatgtttaaagaagatgatctaattatttttaagctgggcagtaggtgtatgacagttctcctccttacaattgtttgttgttttttaaagtgggtcacattatggggcatgaccaaaaaataatcaccatcatcatcctcctccttctccacctacagcccaaggaatggaaaaagaaactgtgttttctcagattctgaggtggcagaaagacaataacacactaactcatttactcataaacatattgttatggattgaatcgtgtcccttacccaccccccagaaaatttcgtatgttgaaactctaacctctagttcctcagaatgtgaccttatttggaaagggttattgcagatgtaattagtgaagatgaggtcctactggagtagagaggaaccctaatccaatatgcctggtatccttataaaaaggggaaattttgccacagatatgcacacaggtagaacaccatgtgaacatgaaggcagagatccaggtgatgcacctacaagccaaagtatgccaaagatgaccagcaaaccaccagaagccaggggagaggcatggaacataaggtttctcacagttgtcgaagaaaccaactctaacaacgtgatctagaacttctagtctccagatctatgagataataaatttctgttgtctaagccacccagtttgtggtactttgttgcagcaagcctagcaaactaatgcacacatattctatattttgaagaaaaaattcccagagaatcatatttaaaatggttaaattaagcaaaataaaacaaaccaaaaaaagaaaagtcccaactacctgaaatatttaattgtcttaggaaactgacttaaaaatatctaatacaggccaggcgcggtggctcacgcctgtaatcccagcactttgggaggccgaggtgggtggatcacaaggtcaggagttcaagaccagcccggccaagatgatgaaatcctgtgtctactaaaaatacaaaaatttgctgggcatggtggcaggtgtctgtaatcccagccactcaggaggcagaggcagagatttgcttgaacccaggaggtggaggctgcagtgatccgagatcacaccactgcactccagcctgggggacagatcaagactccgtctcaaaaataaaaaaataaaaataaagaggaagaacgctatggaatttgactagaattagggctaacaatatgaagcactttgggaagccaaggcaggtggatcaccatgtcggccaggagtttgagaccagcctggccaacatggtgaaacctcatctttactaaaaatacaagaattagccaggtatggtggtgagcacctgtactcccagttactccagaggctgaggcacgagaatcactggaacccgggaagcagaggttgcagtgagctgaggcagcctggtgtccaagctgtggtgagccatgatcataccactgcactcaagtctgggcaacagaggaagtccctgtctcaaaaaaaaaaaaaaaagggccaggtgcagtggctcacacctgcaatctcagcattttaggaggctgaggcgggcagatcatgaggtcaggagttgaagaccagcctggccaacatagtgaaaccccatccctactaaaaatacaaaaatcaaccgagtgtggtggcatgtacctgtaatcccagctactcaggaggttgaggcagaagaattgctcgaacctgggaggcggaggttgcagtgagccaagaccacatcattgcactccagcctgggcaacagagtgaacctccatctcaaaaaaaaaaaaaaaaaaatttaaaaagggagtatagggccagccacggtggctcacgcctgtaatcccagcactttgggaggctgaggtggctggatcacggggtcaagagatcaagaccatcctggccaacatggtgagaccccatctctactaaaaatacaaaaaattagctggacacagtggcaaatgactgtagtcccagctactctggaggctgagacaggaggatcgcctgaacctgggaggcagaagttgcagtgagctgagaccataccactgcactccggcctggtgacaaagcgagacttcgtctcaaaaaaaaaaaaacaaaagagtttaaaaaaatctttacagaagaatgacaatatagaaaaaatacagaaaaaatagaaaagtctccaatttctaatcactatagtaatatttgatttgggcaagaagcaatccagatgaaaccattaagtaaagattattatgggacagaatattcacactgtttctatcatgccatagatcacttgttaattacaaaaggaaaaagaggctgagaatggagtctcacgtctgtaatcccaacactttgggaggccaaggagggcggatcaccttaggtaaggagtttgagaccagactggccaacatggcaaaaccccatctctactataattacaaaacttaggcaggcatggtagcaggcacctgtaatcccagctacttggggggctgaggcaggagaatcgcttgaacccaggaggtggaggttgcagtcagccaagattgcaccactgcaccccagcctgggtgacagagtgagactccttctcaaaaaaaaaaaaaaatgcccttattcttaggagatgtatagaagaaattaggggtgaagtgctatgaaatctgcagttaactctcaaattgtacagaaagaaaatttattaatgttaaaaaatgtcaatattcatagatacacatatatgtgggggcaggtagaaagggagggacacagagacaaagaaaatatggcaaaatggtaacacctggtgatcactgaactattcttgcaactctgaaaagtttaaaaaatttcaaaggtatattgtttttgaactgctcgggaggtttaaatttttgaatttttaaaataagcaatcaattgtgaggaagtctgagaagccacagacttaagagataagatgaaaaataaggaaagtagaatcacagtaataagaggaacagagtttcaaaatgctgtggtcagtcagtagcttcaatgcaaaagtaagttaaattaaggaccaactcagtaaagacaactggattcagcaactgggaagtcagtgatgacctagggtacaggagctgcattgaaatagtagagttgggccacgcgtggcccacatctataatccagcagtttgggaggccgaggtaggtggacctcttgaggccaggaattcaagaccagcctagccaacatggtgaaaccccatctctactaaaaatacaaaaattaacccgagacagtggcgcacccctgtaatcccagctactcaggggcctgaggcatgagaactgcttgaacctggaaggcagaggctgcagtgagctgagatagggccactgcacttcagcctgagtgacaggggaagactctgtctaaaaaaacaaaaaataggcctggcgtggtggctcatgcctgtaatcccagcactttgggaggccgaggcaggcggatcacgaggtcaggagatcgagaccatcctggctaacacggtgaaaccctgtctctactaaaaatacaaaaaattagctgggcgtggtggcaggcacctgtggtcccagctcctccggaggctgaggcaggagaatgacatgaacccgggaggtggaggttgcagtgagctgagattacgccactgcactccagcctgcgtgacaaagccagactccctctcaaaaaaaaaaaaaaaaaaaaaaaaaagacgtaaactgggtatgtgcctttagaggtggtgcacatttttagcattataaatgaatataaatgagtggcaattgttactttggtccacagatttttggtatcttaactagtttttggtctcttccactaaaggcattgcctgttgaaccttgttaggaatgtaagtactgaaggcaaactgcctgggtttgaattttgttctgtcccttgcaccctgcctggtttcaaatcctagctctgcttattacgttcttttaaggggatgacctttgagcaaatgtcttagcttctgttttccccagtaaatggacacaatagttgctactttgtgaaagattcatgtaattgaccagcatttaccaagtagcatcagtgtttagtttcagtcattggtgattctgcagttggactgtgagggggtattggggtggggggtggtgtgtgtgtagcacttaattgcaggcaggaaggaaaagatacttttgataaccgacaggcagcttttctctgcttttgtgtcaaaagggaggaagggagtttggagagggaaatgaattctctgtaacactaagctctcttcctcaaaaccagaggtagatagaatgtgtaataatttacagaatttctagacttcaacgatctgatttttttaatttatttttattttttcaggttgagactgagctaaagttaatctgtggcgacgttctggatgtactggacaaacacctcattccagcagctacaactggcaagtccaaggttttctatcatgaaatgtaggttctatactaacaattaacaagtgtacttcaataaatttaaacattctcaggaataattgactttgtttctttttttcttagacatttcatattattttccttattaaatataaccaaaaatcccacagaaattaactgaggagcctctaaatatcaacaaagttatcacttgatagactagaattaaacaagcaagtggttccaagaaatggcacgagtgtattaatcataaaataaaatttctacatgaaacattcagccattctagaccatttctgtctgtgcagactcatcttttcctgttctttgcaaagcccagctagagcaagcaagttcttcccaataggtttttcccatctctggttgcttggctggctgggcttcctctacaaacccccttcctttcccctaagcagggcccggtgtccccatcccgcggagttgacctcatgagggcatctgaccaggagtagctattcctggtgctattgtcattgtcctgtttcatgtgtgaacatggctggctctacagagatttggcgggtagcaaggaggtttctttttgaatcttcttttggaagtcagacttgatgaggatcttatgcccactttttcctagctctgtggtgtcaggcaaagtctgtttctgcaaatgggggttaagaattcctacctcacagcggtcttttgataaataaatgagatcttaagtgtaaattattccactagaaattgcacagtcactttggtctcttcatcctggaggtccactgacaaacctcatgcaaacctgtggccctgttcataaagtgttttgatccatactttcaaatggcctcaggaagaccttttataaagtaaaaatgttaggcagccacatgatatccattgacccagtgaggctgttttactggatataagaggtttgacccggcattttggggggccgagacaggcagatcacttgaggccaggagctggagacctgcctggccaacatggagaaaccccatctctattaaaaataccaaaaaaattagctgggcatggtggcacatgcctgtaatcccagctacttgggagactgaggcacaagaatcgcttgaacccgggagtcagaggttgcagtgagccaagccgagatggcgccactgcactccagcctgggcagcagagtgagactctgtctcaggggaaaaaaaagggtgaggggagggtttgaaaaaatagtagcatgtagttatgtttctacaatatttgatatatataaggatttaccaacctcttgcattagctgctatcccctacagcagttgctgtaggaaaaaaacatcaagttctgagctcctactgtttgccaggcatattctgagatgatcacgttgaaatctcagagttaccctgcagagtagtcagggtatcactgcctgacagatgaagaagctgaggcttccagcagataaatgacttaccccaggccacatagaaaatgagtgggagagcccaggtctgtctgtgaggtataatgaaattagcataaaccctccacattggcgccactcgcataaattaacatatattctctcacagaaagtattttattgggcataacagtttgtatcatttaccgtttaacattagccgtggatcttcccacatcacatgactatgcctcattctttttggataatatgattactattgaatggatttactatcattcacttaatcaatactccttttgatggccattttaattgtctattttttccttttgcacagattggtgtaataaacgtgattttatagtaatatttttgtctgcctgtgaaaatgtttgctggacaataaattcctaggagtcaaataaggtcaaagattataaatacagtatttattttcataaatattaccaagtcagccacaaatgtttaaattactaatggtttcagattattgtatttaatgagtaaacacttttatagggtttacttttatgaacacttttatttgccagatatcattctaagtcctttacaaaattaacttttttaatttgtaatataaccctgagatgtatattaggattatccccattctacagataagaacactgagaagttaattaacttgccacatatctaggaagtgacaaggctagttgcacagccaggcagtctggctcctgagtccacattttagacaacactatacctcctggttcttttgaggcattactgctggaactatcctaatactcataaataaacatttcttttggggagggccaaataaaattttaaacagaaaagttttcaccaactgtcaagctcataaagttgtacgttatacacttttttcatgatgcccacagataatttattaatgatatcatctattttaaaagacgtatgtaaaacccaacccttaagaaaggattcctatcactgttcccacaggcaccctcctcagtcttatacctttccattccaccccccaaaacaaatcattcagcatatttatttcatactgtaatataggaagtagcttctttttagattttcttagattattaacattgatcatacaaacatggaatagaaattccttatgttttatctggatttaaggtgctacataatggaatctatttctatcaagccatacacattggagataatgaaatcacttgtgttctagcctaaacgttatgggaatttcagaactgcaacataacagataatccttggacgaaaactaaatctctcctctggtcaggcatctatgtgcatcagtgaagagaagacggggactgtggaagggaaaacagtgagtcaggaaggactgtggccacatctgttccccggaccctcaagtagttaaatcctgacctcctctaccccagactgtcctggggaacggccaacactggcttttcacaactgtgtgttaccagaaatgcaacagaaacccagctgaatccccagggtttcccttctgcccttctcaatggaaagatctgtcccaggaccatttattccaacattttcaattatgagaaatctgggaagataaagttattttcacatttctcaagaaatacatacttattcatactcatgacaggaaagtcagaatctacagaaaaccaagaagatttttaaaaatccatgataccaccatcaaaagagccacacttagtatgttggtccacaggtttcctagcacccttttctgttggtgtatgcacaaaatacacaatcacattctgtctacattttacaatttgccattttttgattaacactatatattgaccaatttttaagacctgcaacatatgtcgacaacattatttcagaataatatatttataaataaacgcacacacaaactgtctgtcttatatacaacacgtcttactttctaattctccactctggaagatttaggttttgctaactttttaatatactcaccaggaatcagtaaactttttttataaaaggccaaagggtagatattttaaactctgcaggccataggtttctgttgcaacactcaactctgctgttgcagggaaagaagccatacacaatttgtaaatgaatgggcatgactgtgttctgataaactttataaaaacaggtggtggactagatgcagcctgctcctctggacatggcttaccagcccctgacatataccactacagaggatgctgttagaatgaaatctctttacacatctctgatcatctccttaggactaattgctagacatgacatcatggtagctgtgggtcaaagggcatgcacgctctgggatgtacattgccagattgctcatgatcagcctttctcatgtcaaaatgttttgtgaccaccagaaggctggttctgcttttattatccattgactgaggagtagaaatgacatggcatgtatgcaggatatttaaccatcgtatagataatccttgtgcacaagtgcattctatattctttcccaataggtctacatctgccagagttgaaataaaataaaacaaaacaaacctatttagcaccttctgtgtagcaggtccattcatgtatgttgttgtatttcattctcagaattcttatgacctaggcattttaaaaatttttttaaaaatattgagttgacaaggattgtgtatatttaatgcatacaatgtgatgatttcatatatgtatatattgtgtactaattatcacaatcaaatttattacatccattaccacctatgctgtacattaaatctccagaatttgttcatcttataactgaaagtttacaccctttgattaatagcttcccattttccccacctccagcccttggcaaccaccattctactatctgtttttatgagtttgactctcttagatcccacatataagtgagatcatacaaaacttgtctttctgtgtctggcttatttcacttagcgtaatgtcctccaggtttatccaggacaggagtttcttcttttgaatggctaatagtccattgtttatatgtattttatttatccattcatctgttgctggacacttaggctgtttccatatcttgggtattgtgaatagtgttgtaataaacatggggcgcagatctctcttcaaggttctaacctgattgctgaatcgtatggtagttctgcttctaattttttgaggaacctccatactgttttctgtaaaggttataccactttacattccaaccaacagtgtacaagggttctctttcctctatgctttcgccaacacttgttatctcttgtcgtttttttataagagccgtcctatcctatgaggcaatatctcactgtggttttgatttgcatttctctgatgattagtggtgttgagcaccttctcatatgctggctggccatttgtatatcttccttggggaaaaaagtccattggggtcctttgcctatttttaattgcgttattcatgtatttattaatttttgctattgaattgtgtgaattccttatattttttcaaataaccccttatcaaatatatgggtcgcaaatattttcttccatcccgtaggttgccttttcattttgtcatggtttcctttgctgtgtaaaaccttttaagattgatgtagtcccatttatttattttcacttttgttgcctgtgctttggtgttacatcaaaaaaaatattgccaattatgaccaatgtcgaggagatttttccctatgtttacttccaggatttacatggtttcagatattacatttaaatctttaatccactttgagctaattttctgtatatgatgtaaaacaagtgtgcaatttcattctttttcatgcactttccccaacaccattcattgaagagagtttcctttctacattgtgcctttttttttttttacagtacagtgaaagcaagtctattaagaaagtaaaggaataaaagaatctacattgtatatccttgatggccttgtcaaagatctgttgaccatatatgcacggggttatttctgggtgagcttggcattttttttttttttttttttttttgagacagagtctcgctctgtcgcccaggccagactgcggactgcagtggcgcaatctcggctcactgcaagctccgcttcccgggttcacgccattctcctgcctcagcctcccgagtagctgggaccacaggcgcccgccaccgcgcccggctaattttttgtatttttagtagagacggggtttcaccttgttagccaggatggtctcgatctcctgacctcatgatccacccgcctcggcctcccaaagtgctgggattacaggcgtgagccaccgcgcccggccgagcttggcatttttatctacctcattctaccgatgaggaggccgagtctcagagagttcacagacctgcctaaggtcactcagctagaggtgatacaaccagggtttgaactgagatctgccaagcttctgagtttattctttttcccccacaccaaggatcctcaattctgccttactgacatcaggatccggtcaattctttgtgatgggggctgtcctgcacctggcaggatgtttagcagcttctctggcctccacccactggatgccaggggaatgcagaagaggcttgttcattctcccatttaatcctcaggacaatatctgacataaatgttacgtcttttattttataaatgaagaaaatgagactcagaaaggtttaagtgagttacttaagaacacacagacagcaaaggtagaactggaaaccgaacacaggtgtccacatgggacaacaaaaaagttcacgttccatcttcttttgagtctctcatttcaataattaccattgtgtggatatgagctgaagtacaggaaacctggggctgaactctcctcccatcaggcctaggagccccagaccagaaccccagcccaaggtctcccagtcaggcccgctggcgtgagctggcatctacactagcatggtctcccaaagctgcagggatgccagtctcgccgctgatgaagaaaatgaagggcatttgcttctcatgcaggctgtcgggatttaacacagattccttttcttgctgtcttctcccatagcacaaaactgggtggtccatccccctcccagtgtcccaaggctttgttgcgtgttctctttaatttctcccactcttgtggtgcaccctaccctcatctccctggcaacctttctgctgtatcctctcgacacctggatcacaagaacacttgtgagaccccttaacaagttacatcccaaattatcattctcctttgtcctcagccagtgctcaggtccaacttgctctcctggggtgactttctttcctgcccaatatggtttcatcatctgtaaattggggataattaaagtcttgatcctgatatttgactctcaaagcagaagtagcaagctcagccaagtcacttcaacaagaggagaagttccttgtgaaccaaaagggcactggtcacaagggccgctccttcttctgtcaggcctctccagcacgcccttggctcagccaaagaagagactcaggctgtgcttctgcactgttgggataacataggcctcttccatgtggttccacaccaggaacatggggacaatcagacctctcccagtgtgggcataaggatacaagatcatgtcaatattgacattcataatggctgggcgcagtggcacacgcctgtaatgccagcactttgggaggctgaggtgggcagattgcttgaaccccagagttcgaaaccagcctgggcgacttggcaaaaccagtctctactgaaaatacaaacaattggctgggcttggtggcgcacacctgtagtctcagctacttgggaggctgaggtgggaggattgctcaaacccagggaggttgaggcttcagtgagctatgatggcactgctgtactccaacctgggcaacagagtgaggccctgtctcaaaacaaaaacaaagacaaaacaacattcataatagtagcaatagctactatgtgccaagcccaggcacctcttcgagtctttgctgtcaccctatcaggtaagcgtgcttagaagttacacgaagcacacggctcagtgtttggcccacggtaagggcctaaaaagggatagccccagtggtggggatgctgctgctgctgaccattaaccccagtctgctccaccttcttccaggcagtctgtgagatgtttcatgtccgaggcaaacagcacattcagatccccaagctctacacctccagtgtgaccaggcacctgcaccacttcaggctcatgcaggactcacagcctttggacctcagctaaaggacttgcttctcttcagcacacggggcttgtttgtgttggggtctgagccctgagcccatggtcaaggagacccccaggtctttctgaacagagacagctggcctgggggcctccctctcactgcgtgcaagaggctgttagggtgcaagactcaaggcgctgagggaggctgtttcaggagggagccccaggagggtggtggagacagaagggggcagcatctgccgaggccctactgtgtgcctggcaccgtgtggggtttctggcccatatgggctaagtgaccctgcacactcctcttaggagagaggctcagatggagaaattgcagttcaggaaggtgaagcaagctgctagcctgtggccatgttgggatctgggcctcagccttccagccacgaaggcagccaagtgtcatgaagaaggcatcacagaggcaattccaggctgtagtggtgaactttccactctgcatccccgggtgctgtgccctgtgccctgtctaaggtagccctgtgggtttctatatgtttaaattgtccccagcatcaatgatgctctcctgtggatcccaagccatggagatgtcctgggacttttcatttttaggtacctaaattgaatttcccaacacacagaagcaagacagccgccctaacagactcttgcatgcagtgagagggaggccgccaggccagctgtctctgttcagaaagacctgggggtctccttgaccatgcgctcagggctcagaccccaacacaaacaagccccgtgtgctgaagagaagcaggtcccttagctgaggtccaaaggctgtgggtcctgcatgagcctgaagtggtgcacgtccctggtcacattggaggtggagagcttggggatctgaatgtgctgtttgccttggatctttatttgtgattcagaaacagtggaataaaaggaaaggaaagaaaacctgaatggccacctcagcaggatgctccaagggtagtgtccaggtggcactgactcagatatgtgggggcttcccccacccatgctcaagagccactttgccatttcaccatctctctgtcctccacacccctcagcagcaagcacaacaagaatgtgttcaccatgaagctcaaatctcagcagaatctagagtctgaaatccaagtaagggaaagtgtagagcttcttggatgatgccctgtcaattttattttaacgaatgaaagaccagaagaagtcagtcttgaaaggagaggacaggagcatctgctggcattagcagccgtgccatcgtaggaccgactcacctggacccgcggccacctgtgcttttacatctagtcttggttaaccatgggccacttttccagcttggaaactaagcatatgctccacttcctctccttcctcattgaactctttcactaaaagaacagtgcaagagagacttaaactgtttgcctcattcttaagacctttcaggaaaagtgttggcagggaaggaaatctcccagctctgggaaacagtcttgtggattatctgctggtttcattgatctgtgctgtcctccctgcattcattaggaaaactggccttggttcaaataagaacaggatttgtcctggtgacagagaaaggtttcttctgatgtccatatatctccgagggggatgctttctccaggcagaggctgtggccaagcgatcggggggctcagagggctgctgggaaggggtgggcccctctctccccagagggaaactcctggggacctctcgagcacccctgcccatcctttaaacataaattcataaatacaaacaagtaggccattcacagaaatatataaaatatgtcataggacgggtggcactctcatatggcaataattatgacaggggccggcaaatgacctgagtgacccggagtgacctgagcactgactcccaaatgccctccataggatgttctgcatccccgagaccctttcctgggtcctcctgggccctaccaccccctagaccatccagacctcaggtcatccccctgtctgttgacagagtagtctccgttcctgaatgtgctggtcaccagcaacagcagctgctcctcctccgggaagctcagcctatacttctacatgcagagaacctggacggcacccaggtggacctaagccttcagctcccagtagacgctctgggtttcctaccctgcccagacactctgggcttccccccacacctcccctcgtccggggctcctgtgtgcatctgtctctcccagtgcccagcacaggcgtggaacggaagaggtgaatggaccgatttgaacacatcatcctggattctccgttccctctcaagccctgcagctaacccatcggcaagccctggaggctctgcctccaaaatcctgcctatcccatgtgcaaacgcctctcaccacatccactgctatttgcagttctgtgtgtgtggaaatacttccacaaatttggaatgaacaggtcacagctgtgcctggagggaatggccagggaaatgtgccctcaccttgctgttctatccaggcccacccagctgaggatgggggacctgccaccactctcctggcagttccggactcctgggaaccggcaggtgaggacccaagagtgttttcagtgacccggctgacctggtcatccgtcagtcccaccttggcctaggcctctatacagcacagatcacagctcattccatcctggcattacactggcctgtgccctgtcctcagggtcacatccgtctcccagaagccgtgcaaccctggaaaacccaggtctaacagtcaggttcctcctccgtgcattaacaatggcgttgacgcctgctttgcggcacgctgggaggggagagggaggtgtatgctggagagctccccaggggcaaggcctggctctgcgtcacccactgtcagatcctgagagcctggggctggcccagcacgtggccaccgttccctaagagttggatttcatccctcagtgctgaaggcaggggatagagcttagacagaccccctgcgtcctgtcttctttatctacagctttctcatccttgcccctttcacgtgcacccggcagagcaggtgttcactgagcttgagcaaaattcaagctagagcagctgatggatcttgaggcctagattcactgtcaaagtgtttctcaaacggtgctctccagaacaccaaggaaaactcattgactgtgtaagtctgaaaatccctgcccaccggtctacctttgtgtatgagcaatcagctctaccattcagcccaggtgtgtgtttgctggaccatgtggaggaagctgaagagacgtgagctgaaggcagagggtgagtccaaggtgggatcttgggacaggtacgagaagttaggcaaaaatgggataattctagccttcataaccttagataatagttcacattattatttagttaatagaactgtacccacattaaatttcttaaatttttttaagagataaagtctcactctgtcacccaggctggagtgcagtggtgcaatcatggctcactgcttcctggaactcgtgggctccagcaatcctcctgcctcagcctcctgactaggtgggactataggcacacgccaccatgcctggctaatttctttgacttttctctagagaccgggtccacctaggtttcccaggctggtctcagacttctagactcaagtgaacctgaacctcccgcctcgacctctcaaattgctgggattacaggtgtgagccaccacacccggcctaaatttcttatgtgccatgggactgcaaaacatcattattaggggcagctggatggaaggtataggaggatactatagtgccttttcaatatttctgtctaaaatctaaaatcatttcaacaggaaacatttatttcaaaacatgaaggtggttatccttccatgagtttgaagtacaaaggcaggctcacggtgtcgtcagaattcagaacgatggtcgtggggctgggggtgctgggaggggctgggcatggttggctttgtgatctggggtctggtgtgttccatctctgaatctctctcgagctgcactctttcttaatacattttcataagtttaaccaaaaataaaacgaggatgcgaagcttgcttgggttgttaagcctagggaaattatccagccatgagccctggcccagatgcttctagaagcctggagggaactgagaactttccaagtggaggccgcagaggcaaggccctgaggtgggagcacactgctgttcgtccctagctctgaagggggtgccctggtcggaatcagtgctgggtgcagcgaaagccgatctcacccgctccgcagggtgttcagcctgccagcagggggccagctggtcctcctgggatatggcacggacccagcagctctgtctgaaatcataatggcggaaccaagggccctctacgtccaggtccgttgggaggcggggcatggagttccactgcaggaatctccaggaaccctgaggtcctccctgagccagggccgggctgggcacaccctgagtgcccacagggtaggtgtcttcccggacagccccaccaggacagggtgtggaagaacgaggtgcccgtggcggggaagctgaccaaatgggccgcgggaaccgggctggtgggcctggaggggcctgcctgtcccccttgcagagggtcttcccgccacgtgaagccggcacaggcctggatgccgacgacccttgctcgggtttggctgaaaggaaaacagacgcggtcagcatctccagtgagcccacgcaggcctttccgggctgggccccacctgcctgcgtctctggagtcctcggggtctctgtgtggcccccgtggcctgacaccgaggacacgcctgtagtctgctgatcccagagggaggggtgcatgctgcctggcgtggggaagctgtcgtggcatggcgggtggctcctgggactgcccccagggttcagactggctgggggcttcctgccacacaccttcgtcccagggctgttgggcctgggatacggcccccagtcagaactcaggtgggaggggccttggatgtcacccagccccttgtcacctcacgtggggacccgtctccgcagtgggtgattgggcccggacgtgggtcaccctctgccctcctgggctgcccagtccatgccaggactgaccgttcccacttctggctgaactcttggctctggctctgggcccggggtcccgcctgtgccctctccctgaatgctctgtgggtcagagacacggattcccttgtctccctggctccaggcttcttgtcctggcaaccttggaggagcgtgcaggagtgaggggcctctgctgctctctgaggctgtgggtgcttgcagggaggggcggggtctcccacaaatgggtctgggctcgtctagtaacttggagggccctgcgagggggagagggagacaccgtggaaagtgggagggggcttgttggagggtcttgcccacatccccctcctgcgtgcacagcatgtccagtatacacgcactgagcgcctgccctgaggaccggtgggcctcctgtactttcttagagtccaggaggaagaggaggaagaaaaggtgaagaggaaggcccaggtagtagggttgcgggtcccgggcactcccctactactgactaccccagagggtgacatgggaggggacatggcactggagcccacctgggggtggcaggtccccctgctttcttgttagtttcttcatagaggccctaagatgcttgagcacagtgtcctcatccctggcccaggtatcaacgaaccggttgcaaaaacgtgcccacgggccacacctggacgtcttcgtgaggcgctctagggacagggtggatatcaggccaggggagttacctgggaatggtcacagctcatatcccgtggccacttcagtctcctactgggcggtgccggatccttttgtggccaccccaggtgtccagatatacacaggagactgtggctggggggcgatccggacagggaagtgctcaccacactctcgactttcatctgggtcatgtgggggatgggctcggtgtcacagtgtcctgcccagcccacctggccagacctccctctgggccagaacagaggatcatgaggacagtgtgaggaagctgccctcgggccagtcggggtctgaccccagggctccccaggccccgctgggcacacgtagacttactctgctgaaccttaaaggcgattcttgttatcggcatcaacgcctgttcgccttctaccagatacacgtcccacaggcgcagggtgagcccgagagagatctgtggggacagcaggtgtgaaagaacctggtccttccaggctggggctggtggctcgagctgcgcacactggggcttcagtctccagagtcagtgaccttccccatgagggtcgcctgagccctccaggacgctgggtcagacaaggtcttgaagctcctcatggggggcactcatttgagtggggatgtggctcctggagagaggggcttgcccagggcttgaggcttccctgagccctctcaagtcgggtcctggcccagtctgcccatgaggctgggcctgagccccagccatggccctgggatgaccccccttgggcagagggttttgcttgtgtgtcctttggggacccgcctgagcctcctgtgggctgggagtgagccagacccccgggctggggaagcagggcactgcagggcaaggaaggtccctgagccagggtctccctatgcctccttaccccgtcaatcaatatccggatgaggcagcctaacggggaacactgcccacatagatctttcttgtcctgatggaagcaacagaggtgctcaggccactgggctgccctaaaaacctccctcttccagggcctctgaagacccttcccctagtgcagaacactgggcggtgtccagagctccccacaacactgtcaccttcccacactcccggtggacacactgccctttgccctgctctgtgggagctgggcccccatccctgtgcctctgtctcctccagggcaggaaaggaaaccaactcccagcccatggagaacccgacgtcccaggtcaggccctggctgggactcagccagtcaccagccccacgaggggctccagcccccctgctcctacagccccacgggaggcagggcctctgggaagagctgaggggaccataaactcacctgatgccccatggtcttgggttgtgacgtggctaccacatgctcctgttggtcttggagcccctggacggtcccgccatttgggctgtgaaatcctgagaagcccccagcccatcatgaaatcagagccttcccccaagatgtggagccatcagctgcaagagctgggcagctggagaggcccccaaaccccaaggcctcccaccctcccatctggtgaccccaacatgcggcctttaccctggggaggtggggcgggaacattccctggagcctggctggaggttcccctggaggcctcctgggccagggtgcaaaaagggcaagcctgactttcaggccacgacagggtggccggaactgggtgggcgctgggcttcccggtcatctcctggtagtggggtcgggccagggaacaggggatggggagatgctgccacctgggcttggtcggcccattcgtgggcaccgatggcagcaggagcccgggcagctggagggcaggaggactctcagggaggggagagtcagctgcacagaatcagagccggagggcgtggctccaggacacagagggtggccacggggaggatgagatgccctctgctgatggggatgagaggcgtctgatttgggctttgggggtcagccgtggactcctgtgggaccctcagcagagacattctaaagtctcccaacaagctggcgacacaaggagggtgccttggctgaaagctgtgatcacctggccagggtggccatccccaggtctggctgcaggaggtccccggggcagctgttcacttaccctgcagggagtgcctctcactggccagcagctgcaccagtgcccagaatgcatcctcctcaggaagatagaggaggaacaaggcggcgatgtggctcaggtccctgcagtagcccacctcctgcaagagccagagtcaccatggaaggacatcacctgggagggctgaggtcacctgggaggactcatgtcattggagagggcagaggtgactggagaggcttcctctgaaggagaggcttcctctgaaaaagaggcttcctcaggatgcacattcatttcatgacaagagccaagtccatcaggcacttcagcaccttgtccaaaatgtctgctgatagcaccatcctgtgtgcgatgctgccaagctcctgggctttggggcagccccaggaggagggcgtcatttcttgttctgagaagtggtggtcaggcccaggtgacaccaggagtccgggccctgactcctttgtgtctcagcttgaccccttgagaccacccccttccttggaggtttatgccagcggtgagctgacatcctacctcctatatcctggtgggtcacaaatactaactttaaaagaagcaacgacacccccaccagacacccactcctgtcaatatggaaatatggcccgggaacctcactgccgggaatactcaccgggttatactcctcatatgccaggaggatgtggagtagttcccgctgcctaggaaacagagaaagggggctttggtttgttttgtgcagatgttgttaatttcactttgtctacaaagcctaacagcaaatcccatttcaggttcagatgtttcaccagataagcagtgagctcttcagggcctgagactcttgaagaaatgtttcagtaaaatccacatctgtgacatgcaaatagcccagttgtacagtgacttgcctgatccttttcactctgaatgattttttttttcagtttgcacacacgccagttcagtctgtgggtgtacagttcctccacggttccaaaccgatgtgcagagtctcccggccaccgctccagcccctcctggggcgactccttcatcctccaagtctccagggtggcccctatgcaaccagcctctccccgatccgtcagcccctggccacccagactgcttctcagtccctgtggtttggccttttccagaatggcctaggaatgggaatcctactgtggtagcttattgggtctggcttctgtccctcagcaaaatgcatctaggatccacccacgttcgtgcgggcatcaccggctcgttcccttttctcactgggtcttccgtttgaagggaggaccagccttgctctccccatccccgtgttgaaggccgtccccgaaggctccgtgtgtgagtgacgaggagtcaagcagtgaacctggcatgctggtttcatgtggatgtcagtttgcaaatcagtgggttcaatatctgtgacactttggggatgtgtggttcaagtccatcgagctttgtgagccactgcccaactggctgccaacgtggctgtgccatgtcatgttcccagcggacctggatgagagtttccaggacccctaattctcccagcatttggtgctgtcactgttgcctggggggggctcatgggccctctatcctgccaccctcccgtgggtcctaccatgggtccccatgggtcagggagagcacccttcaccattgtgcatgattttgtttgctgccttccatctcctcaggatcctcctgggttctggccccacatgttccagtctggcccagggcttggaaccagggaggtgctcggttcatggtgccggctgctccctgggccgggagagctcttggcagctgtgtcatccctcctgggtgaccctggcttctgctccggggaagcccccatccctctcattcaccccatctctgctgggaccctgtggctcccgtaggcttacttggttccgtatcgatccctgaagaacatatgcttccttaatgtcccgcttatgtcccggtcgatgcgctggatgtgctcagatgacctcttgcccttctccttcatgatctgtagggcagggccaagaggaggaagcagtctcagaacagatggaagactccctgcccccagtggcagtcagcccacagtcagcacttcgggaaggaaggacagaaggaaggtttccttctgcagaaagctgcattttggcttgttactgaagccagggagggtcaccagagctgagtttgtctgtggtgactgtgtcaccatctgtgcccagggtgttcatctgaccttcacccccagctccccagggtggtcttgacgttccctccagctggagacctgggccccgacacggcctgtcctgtttgttgtgctctggctgagcgtacctggtatcttccggggtttttcaacttcatttcctcagtgttcaggaggactgaccacatcgggccccggatgttcatgggcattcccttgtacgctcgatctatgagctgtgggcagaaaacgatctggtgtcacaggccacggggtgaccccagtgaggaccagagcccggggattctggaaattgtcggttttggccccatgattcctcagtagaggtgagatcaagctgggacagggtctcccttcccaggactgaaagagtggatggacactcagagtcgaaactctgatctgaaccttttccttccttcaggtccccagggcatccctagccttgagctccgggtagtcccagccctagattcagattccctccctgcaaggtgacgcttgcacgaataggcaggaaatctggcgaccaggcctgcagtcctctgggcgaggacagtgtgccgcccaccctctgagaggctgatggtgccaggccacagccatgggtgcctgtcccctgtctctgcagagagtgcttcctccctccacacgttacctttctgctgcttttgtatttctcccagtctcccagcatatccacccacttgctctttcggctgatctcccgccgaatttgctgtcaaatgaggcatgttggagttagcggagctgccaggcttcccagagccgcccgcggatgctgggtcttgggctctggagccctggtgggagccagctggaaggagccagggaagggcagacctcaagggctgagagcctttgagcaaatgagcaccagtgggctggctttgggaccccgggatgtaccatcctcaggccacagacacaccagtcttaggtcccagcctctaggtggggtcctgacacaagcgcgcagccacccccaagccaggactgtggttctccttttggaattttatcaaactgccaaagtgaacagcaacctggggtcaggtccagcagggactgctgcccctcccagtgacagcgtgttgccctcacccgccaccgctcaggccagctgcttcctctgcctcactgaccacccgcccagtccctacgtccctggaccagcccctccacgcatcaggctcttaccttcgcctcccgcgcagtcagaggaggcagctccgtctcactgtaaggcaacccaggcagagctgaggaactgcacggggcctggagcggccccagcctgggtgccgacccccagaaaggactggctctgtccctttccagctcagggctcagcccaggagaaggcacagggaagggaggacaagggccttcctgtggggctgattcccaggaggggcaggacctgggagaagaaggagtgtagggacagcctggccggggttactggggcccctggcgtggggggcggtcaggctgcccaatggggctgcccgtcctggactcgaggtggtgctttctgctggagctgagaaaggttagccctgagatgggatgggggccgcccagggtgggcgaccgggccctgacaggagtccctcagggagtgaccacatccccccgccagggtcaagggagcctgccctgagacctgcccggtgtactctggctgcaccaggggcccaccccacttgacagccccaaggcccttgcagattctgacctcccagcatccacctgcctctccctgcacccgagccacacaccctgcgtttcagaagtggcacggctcatcagctccctcccgccctacctccccagggatcctctgtctctccatcctgtgatccctgagggatgggctcctggctgggctcctcttacccggccccagatcccttcccagcaccagacccaggtctttagccgcgagccctgctgcctccctggcctcaccgtgagatgcccagaacggggccctgcccatcttccccccgttctcctagggctacagcccccattgtcaccatgccttttcccctcacgggacagtgagggctgtagctctaggggaatgggggagaacaggggcaggtgggccctcagagacctgctggacaacagccctgaggctgggccaggcgtcccctcaccctgtggccataacccttgcatctcaccgggtttgtctccaagtagacagggccagaccctcaggctgccccgctcctcttgtgctcacttgccgacagaactgctgagcgcccaggggcctgacctagcccagtctccattcccaccggctccctagatgggccccacacctctggcctaacaacctcgggctggacctgcaggggagtcagggaggagttctgtccctggaaaggaggttgacccgacctggtgagacatgtcctgcgtcagaaaggcctttctaaaagcaaacccatccctgagctgagacaggtgctttaggggtgaggggagtgcagaggactcactgtacaatccccaaatgatcgacgttgttgttgtagcttcgaaaaggcttaggccccttgtcctctggcagcccagctcggtgtccctgtagcccagagggagccttggtgaggggtccaaggtaaagggtgcaagggcctgggggcattggccacccgtccctgccctgtgctcctagggagcccaggaccctttgaccagggcacactggaagaggcctccctccaagaagcagaccgacttgtaccttttcgtatttcataatgatgtcctctcgctcttgtgcccaccaactgcccgcgacctctaccacgtccatcctgtgagacagaattgtctaaaggtcacactgtacgcggcggcttcggagaacacctgaaccgctctcgccgggctcccagatgctggctggctgcgtaacccccattccaccgccgcccccagggaaaaaggggccagacccagtggcccacagctgctccagtctctggagtctcaagtcccaagcaggggtgggcatcttcccaaggacttgagtacagtgggacctagacagagaatcctgttgtcccccaatgccatgaaatggggacacaccggccccagcaggttgaatggtttccacctgccaagggtgaagggcccatgatgggctattccagggatgtggaggcagactggggtcagcgaccagaggtctctgtgcaatcggcctcctgggatgctcagggcctcagcgatgcccagtttcctacagggaacaagatctctcccgactgctcggttctactccgctcatcactttggctaccgtggctcttcagtctgaacagtgaagccactttaggaataacgcctgttgagcaggagggtgttgggtttgggggatgaggaagatctattgtacgcatggaaaccacgtctctcgcggagggactgtggagtccaccattctgagccgtcccaacaggaggaggcttcattttcctgggtcactgaggaagaacagtgggtccttggtcctggagaacagctggatggaccgtccctcctgggaatactcgaggcaaaaggagggcgaggcctcaagaggaccacgcagagcaagaaatacctggggagaaccctagtgcccggacccctttgaacacaagggaagatagtctcccctcagccagccctccagggctccttcattttccacagctgcccaagggcagcaggctcccccggacaagggaccatgtgtgttcagtggggcccacagcgaccatcaggacccagcttagggcacagaggtgttctgaggaccgtcagtggatctgtaccagtggctctataccagtggctctgccaggaccaggctctgccccatcgggatgggaaacctgggcagatttgggatctagggcagggaggtcacagggttcaggcctgaattccagcacagcacacggcagggctgagagcaaaactcagggtcatgtccggattcccaggccggttactgcctctctgaccccagacgtctcatctgtcgaatggggacatttgggaacagcacccactctacgaagccaccatggagacgaaagagccaatcgtctacacgggcagtgtagaacgggcgcctggtgagtgctcagggatgaccctcctcggtagctgccccacagaggccaacaccgcccgcaccgtagccactgcccccaagtccgcctggagggaagagagcaggtcacgctcacctgattctgatgaatcagctggcctgggtcatgcctctcagggagaaaacctttgagtccacagagctgctcacagataccactgcctgtgtgtaactgctgtagaccactgaggcaggccagagagcagacaggtgctaagcaccagtgacattctgaggtcatggcacgaatcacagtggggccttgcccgggtcagcagcgcccagagtcagggtcctccgctgcctgaggcgtcaacatgcctgcctgcaatgtgtttgtgcacgtgcgtgcacatgtgtatgtgggtaaacacgtctgtgcacgtgtgtgctgcttctctggccaggcccggctgccccactcatgtgtgcacccagttcctcatcactgtcacccccgaggcccagggccagcatcagagcatccatggctgctccctaaccccagccctccccgcccagggtggtcctgggatacacatagcggtggagggaagtgactgctgctattggatctcagaatacaaaagctaatactattacctaatggtctttttagtgtctctaatggtatcactttttcatttctgatattttaactgggtatttctctccatgacccttggatattctagctagaggatcctgtggggaaagtgccgggcacacagtaggggctcactcttctagacacgttatctaaaacctggttcatctgtccttccacgcagggcctaggggatgccgaattccagggtccagaaagagcttgggataaaaagaaacttcaaggggacggctttgacctgggctgagtctacctgtgccatccaactggagtctcaagtcctgaggcaggacgtccagatgccccagtgcagggtcctcctgatcaacacctgctcccctgtactcattagcaacctcacccaccctactctcaaagcacacttggctctcgtatccaggagctctgcatctgtagattcagcaacagcagatggaaaatattcagaaaataaattggacggttatgtttctattgaacatgtgcagactttgttcttgtcatcattccctaaagaatacagtatcacgaccatttatgtagcatctgcattgtattacacatcataaataatctagtaacggtctaacgtatacgggaggatgcgcatagcttatacgtaaatactaggccacgttatatcagagacttgagcatccatggattttggcattcccggggaccctagaactaatcctccatggataccaagggatgactgtatatactcactcaggaaggcttctcattggaggaagggcccggttcaggacagacagggacatcatccctggactactgtccatccatccattcatccattggcaccaccctctaggactgtcccaatgacagccctagcaagtggagataagaaaaaagactggctcaaatggtacagctttgaggtcttggaagatgttgcaccagtatgagaatagggggtcagtttcctccaggatccagaaagcatatcaggcaggctcggggagaggaaaggaacacggcctctccagcagccacacaggcctgcagtaggatggggctggggctggggctggcactggggctggccccgtttatcacttgggcctcatgaggggaaaagaaagaacagggggcagaggaggagcatgggagcagcgggttgcctaaggagaaggcgcctcagggaaggggtattagtttgttttcacactgctataaagaaatacttgagcctaggtaatttataaaggaaagaggtttaatcgactcccagttcagggaacttacagtcatggcagaaggcgaaggggaagcaggcaccttctccacaaggcggcaggagggagtgagcggagaagcaggaagtgccacactttcaaaccatcagctctcctgagaactcccgcactatcaggggagcagcaggggggaacctgtccccagatcccatcccctcccaccaggttcctcccttgacacaggaggattacaattccagatgagatttgggtggggacacagagcccaacctgtgagggtctcagtctatcttgcagctcccctggggctggggctgagtacagttctgctggccctgctctacagcacgtggggactctgcctgtgtgcccccatctgctcttcctggggatggtggctgcttcctcaagaggagggtggatctgctctcctgcccacccctctccagggccttttggagccctggccacgtcctccccaggtaagggcaggaaactgggctccttgcccttcttgctgcttgggtgacaatcctggggtcatccataggccccatcactgttcccgcttctaaatggagggtattttggcacatcttcctggcggggtccggggcctcatccctgttatttattctatcttggtaaagccaggttaagacatctgggcaaggagatagtagagtggcccccaggaagggtgggtggagggcctggcctttgggcttgcctggagcagggtgggagggggcaaggttaccaggaagcagggctgtcagggccaaaatcaggaggcggtgataatgctggtggggggacagggctgtgtgcttggcttggggtggggcatgagagccaaggtttgtcagcacgcagaggggtggctgactcatggactaggggctatggaacccagaggctgcccttagttcctggatcctgggagacttctggagcctgggtgtggggcagcctaggggtggaggtggggcagacaggggtaggggtaggggtaggacttgcatggcagggtgcagggtaggaaaccagccaggggccagtttgcattggcggctcccatccccatccccacccccaagcccacccctacccccaccctgctgcagagatgggcctgggctgctgtcctctgctttggcctcagcagatcacacgatggaagctggcagccccgtgggcaccactcgagccagctgtgacctgcagtttctgcttcctggagtgtggggcgcccactcaggagagcagggcataccccacacccctcattttgaggatgctgggaggtggggaccaaggtcctgcagccctctgcttgcgctatgaaaggtagcctaggagtcctgtgtccgcccatccacgtggggccccaggagcctgaacagtggcaggcagagagatgaggagggtgagagaagtggaaaagaaggagagagaaagagagatggggagaagggagtgagatagagagagagaggatgagagataaggagagagacagaggaggctgagaggaaaaggagcgagagagacaggcagagagacacaaaaggcaaagagagagacagggagagacgagcatgagtaggaggtcggatcactctcgatcccagtccccagtgaaaaccgtaggtcgccatcacctaactacgcgtgcaataaagtcttctgcctgctgcttacagcccgagaacccttttccgagagaataaaatctttgaccgttgccctttctcgccggagtttgctcgtgtcttctgatgaactgtgatgtctcacctatcgccttcctgggctcaaggatccacgaaaagccgacgactcttttggggaggctctgcagtgccttcatctcactaggctccccaggaagcttgcgaacttggcttgagccctaagcagccgagtatgtgccgggcctctgcttctctctttcagtaagagggagaaccaagaaagaggctgaagcatggtctgcagagaaggcacttgtgcaaacaccaggagaatgaggggcctgagttgtcttcatttctcctaaaaacacgcatttcctcccaggccaccctagtgagggcatgaagcacagcgtgtgtgtgtgtgtgtgtgtgtgtgtgtgtgtgtgtgtgtgtttgcaggaatatgcatgtgtatgtgtgtgcatgtgtgtgtgtgcaggtatatacatgtgaatgtatttatgtatgtgcatctgtgtgcatgtgtgtgtgcatgtgtgtgtgcaagtatatgcatgtgcatgtatgtgcatgtgtgcgtgtgtgtgtgtgcgcctgtatgtgtgtgttgcagggctttacagcggacaggatgtgggagggcagctgcagctccaagctgcaagtctttctgatagaatggttaagattccctggaccacagaaagaatgttttcatttgcacctatttttattagcatttaaagctgtattcttcgtagcatgtgaagcttaagttgcttaactattcttagaaacatttacaccagcggtccccaaacgttttggcaccagagagcagttttcttgaagacaactcttccacggacctgggagaaggggaagggatggtgcagagatgattcgagcccattacatttattgtgtgctttatttctgtgattatttcactgtaatatataatgaaataattacacaactcaccataacatagaatcagtgggagccctgagcttgttttcctgtaattacgtggtcccacttgggggtgatgggagacagtcagagatcatcaggcattatgttctcataaggagcacgcaatctagatctctggcatgctcagttcccagttgggttctatgagaatggaacggcaccactcatctgacaggtggcagagctcatgcggtaatgcgagggatggggagcggctgtttctacagatgaagctttgctccctggctggctgctcacctcctgctgtgttgtctggttcctaacaggtggggacccctgatttacccagtaagagaaacacatttttatgtcatttgaaattattcaccctgcaccacccaaaattatcttgcatacctacacccatccaggggtcctgtagcacactttgggagctgtagacagtaagcctggagctccactgagcattccttctctccaccatctgtgggctaacaggctgtgttagtttcctagggctgttttacagtaccacagactgggcaccttcagcaacagaatgttactgtctcacagtactggaggccgtgggtccaagatcaaggtgtcatcagggtgggtatttgttttccactggactgttgatacattcttagaaggtttttggttgctgttcacgttaatttctcttcctttctgcaattgttctctttcagtactccctgatatttttcttcttgaagaagtagctagttaattttgtattttaaaattcctcccctcaccccaagaacttctaccttcataattggttctctcttcatatttattttatacaagttatgtggctgattacattgtttctgtctgtacagatggagagttaaggaataaagaggacagacagactagattacctcaaacactgaaatgctatgatttgtccgaagtcatacacgcattatctgaccagacatatgtgctttttctctagaagcattttgtcattttgaatcaaacaggtcttctgaatctaccttaatgaagttgacaactttcagaggttttcagtggtgaagagaaacttggacaaggagataacttccacaaacagaaaaagcctcgtctcttctggattcctttaatgccagtggtcatcaccaggggcagattagccaccttttccctgggctgggacctccaccttctcctctacaggtgtatcaccttagaaatcttctgcatctcactgtcacccaacacattttctccttccaagcctctgcagtctcacgagtttgtctgtatttttcttcttataacctgccttgctaccctagccagcctggatctcataggagattaatggaaatactcccaacattgggcctttcctgtgcccgtcttcctggtgtatcctggcaaaatgccagcccaatccacagtctgttgttctacttctgtatctgaaggctaaagaaaaagcacctagtcatacagattaaccctgttttaatgtaactattccataatttcaacctcatctgagtactcagccttgcctgatgcctttgcttgcccagccctgtttagttctctcattctcttcaacatctttagcaaatcttctccttccccgtcttgaccttcctgtctcttcacctgatacagaggttcttagctcctacttcgttgacaattttaaggttttgctctcttctgtaaattgacctataggagtatccttctttacccctttcctgtggttttcaggggatggaatatttgtcctgagaaggccaatacatccatcggacacgtgtctctatccccatttgctacgtaagtatttgacttcagccatccggtacactggctctgtctctggtttacacctgctgtctctgtgtcagcactcatttccgctttagcccattgacttttccctcacaacgctactgaacttgtcaataggcacatcagtgatctcctacatgccaagtctcgtggacatttttcttcatgttgtttgactgctgctctgcctgactggatattataatctcctttccttgaaaccctaggctactgtagcactacactttactggttctccgcttaccttcgttacatctcttttgtttttttttttcccggatccctccagatgtggcctaggaatccttttaaacacagtgctccaggcagaagttagttggaggtagttcacaagatgcaatttatttgccatccacccttgcatttcaactccattatttgtccttgccatgcctatctataaaaacactttctccttcccagagatggcagctaacaagacctagcaaagagaaatgggaattttcattcacaatttcatagggagagcaattggtaagattattttactgccaagggtaataaaattaatgagagagttgaagaaagaggcacgaattctgaaactgtctagaaccatctaagaggtaaagctgaggagttttatccgtatttgtaggctgtgattattttcatagaagtactctctgatttatgggtatgtcactgattaccactagaattgcagattggacacattaagcacatcagcgtaaaaatccttgacattttggccgggcgcggtggctcacgcctgtattctcagcacttgggaatgccgaggtgggcggatcacaaggtcaggagtgcgagaccagcctgaccaacatggtgaaaccccgtctctactaaaaatacaaaagttagccgggtgtggcggcacgtgcctgccatcccagctactcgggaggccgaggcaggagaattgcttgaacccgggaggtagaggttgcagtgagccaagatctcactgctgcactccagcctgggcaacagagggagactctgtctcaaaaaaaaaaaatcaaaaaaatccttgacattttaaaaatacctctggcagggtttcagtgtagtcatgatatttaaaatattaccatgatttgtcagtttcttaagtataattttgtttagtcgcacgtatgataagaacatacagacttcttgctgggggcattggctcatgcctgtaacgcctataatccccactactcaggaggctgagtcgggaggattgcttgaggtcaggactttgagactagcctggacaatagagcaagactctgtctcttacaacaaacataatcataaatagatttcttggtttgtggggttaactttttaaattttcctctcattaatttgccacatttttaaaaaattttttgagatggagtctcactgtgtcacccaggctggagtgcagtggcacaatcttggctcactgcaacctctgcctctcagcttcgagcgattctcctgcctcagcctcccgagtagctgggactacaggcgtgtgtcaccacgctcgactaattttttgtatttttttagtagaggtggggtttcaccgtgttagccaggatggtctcgatctcctgacctcgtgatctgccagcctcggcctcccgaagtgctgggattacaggcgtgagccaccacgcctggtctaatttgccacttttatctgactaagataccttaactttatttattccttggattggtaatacagtgaaatgattagggcagggttttgaaaccagagagatctgggttcaaatcttggtgtgggctgtagatgttgggggcaatggccctaaatcctctgactttccagtgatttttcaatgggtaaaataacccttactttgtggaatgttgcaaagattagagaggatgtatataaaatgtttacctattacagtgcttgatatgtagaagatgaattctacaattacactgacccattttgctcattgcggctttagaatagaaaagtatactcatacactagaattgtgcacctagagctaagtgactccagccctgtggaacccttcaatgccaaaatggcgtgtaggactagatagatgaatgtcacctgactctgtctattaaaactcattgtgttgggccgggaatggtggctcacgtctgtaatcccagcactttgggaggccgaggtgggcggatcacgaggtcaggagatcgagaccatcctggctaacatggtaaaactccgtctctactaaaaatacaaaaaattagccgggcgtggtggcgggcgcctgtagtcccagctactagggaggctgaggcaagagaatggcgtgaacccgggaggcggagcttgcagtgagctgagaccgcgccaccacactccagcctgggtgacagagcgagactcggtcaaaaaaacacacaaaaaaaaccccaaaaaaccaaccaaacaaaaaaaaacacctcactgtattttattattattattttcgagatggagtcttgctctgtcgcccaggctggagtgcagtggggtgcaatctcggctcactgcaacctctccctcccaggttcaagggattctcctgccttaacctcccgagtagctaagattacaggcacctgccaccacgcccagctaattttttgtagttttagtagagatggggttttgccatgttggccagcctggtctccaactcctgacctcaggtgaaccacccgcctcgacctcccagaatgctgggattgcaggcatgagctgccgagcctggccaaatctgaaatacgtttgatgccagggtagccttagtggagtgaaatgcttattaacaatgagagtatttgaaaaatatgagatatacaatcatcagaattgaatgacctttctaaggaatggttttatcctaattaagtaatgatcagagtcgggcgaggtggctcacgcctgtaatcccagcacttggggaggctgaggtgggcggatcacttgaggtcaggagttcaaaaccagcctggccaatatagtgaaacaccgtctctactaaaaatacaaaaaagtagcgggtatggtggcgcgtgtctgtaattccagctactcgggaggctgaggcaggagaattgcttgaaccccggaggcggaggttgcagtgagccgaggtcgcgccactgcactatagtctgggtgagagcaagactccgtatcaaaaaaaaaaaaaaaaaaaaaaaaaaaaatccgattataacatctgtgaatggaataatttgtagactcttggcatgcaagaatttgatgttagctttctcaactgtttatgaaccgtaaaggttcatgatgcgtaagttctgttgagatggaaacttgaacgctgtgtgcggtggaggcgaggttgaggacttcgcttggcggatgagtaagcctcacccatctggacagcagcatttacactgcaacttcacttttaacttcgtatttgctgcttgttgttatttacgtggtaactagcatgaatgattcacatacacacatacgtattctttgtctccttgtgaaatattacaccaaggagaaaacaccattatgaagctagtgatagtaaagtagtccccagacacagtgctcttcagtgcaaacgtttgaagtttatggaagaagctctgtggcagtaatagccataaactttggaatatgcaaagatcttgaagtatatctctcacttataccagggatttttgtagagtagagaattgaattttgagcttatgagagctggtagcattggattttttcgctttttgtctatcaatccattcatgcggtatttttttttttttttttttttttgagatggagtctggctctgttgaccagggtggagtgcagtggcccgatctggctcactgcaagctccacctcccgggttcacgccattctcctgcctcagcctcaggagtagatgggactacaggctcctgccaccacgccccgataattttttgtacttttagtagagacgggttttcaccgtgttagccaggatggtctcgatctactgaccctgtgatctgcccgcctcggcctcccaaagtgctgggattacaggtgtgagccaccgcgcccggccaccatttatggggtattttaagatttcatgtcaaagctccatttgtctcagatggtacaattgtctgccgtgttgaaataggtggtaacgcaaattaatattaccctgaaacaagactttattttattttttattttttaaattttttaaaattatactttaagttctgggatacatgtgcagaacgtgcaggtttgttacatgggtatacatgtgccatggtggtttgctgcacctatcgacttgtcgtctaggttttaagccccacatgcattaagtatatgtcctaatgctatccctccccttgcccgccatcccctgacaggccctggtgtgtgatgttcccctccctgtgcccatgtgttctcattgttcaactcccacttttgagtgagaacatgtggtgtttggttttctgttcctgtgttggtttgctgagatgatggtttccagcttcatccatgtccctgaaaatgacatgaactcattcttttttatggctgcatagtattccatggtgtatatgtgccacattttctttatgcagtctatccttgatgggcatttgggttggttccaagtctttgctattgtaaatagtgctgcaataaacatacatgtgcatgtgtctttatagtagaatgatttacaatcctttgcatatatagccagtaatgggattgctgggtcaaatggtatttctggttctaaaagtcttaaaatatcctctaaagtagatttcaaaatacaacatacatgagcctgcaggagacctgctcacagaaggcatctgtaatttataggaagatgatgctgacactagattaaccatgcatttagcacacctcagttacagtgaaaatccaattttgtgcaaaaagtgggaaataaatggaggcgtgtttgctttacgagaatttatttgatttttgtaaatagaaaatggttttattacatgtaaaatataatttcaattggtcactgtgaggaatcgccacagtctttggtaatgatggaactaatttacactcccaccaacggtgtaaaagcatgcctgtatccccacatcctttccagcatctgttgtttcctgactttttaatgatcaccattctaaatggcgtgagatggtatctcattgtggttttgatttgcatttctctaatgagcagtgatgatgagctttttttcatatgtttgttggccgcataaatatcttcttttgagaaatgtctgttcatatccttcaccctctttttgatggtttttttttcttataaatctgtttaaattccttatagattctggatattagacctttctcagatggatagattgcaaacattttctcccattctgtaggttgcctgttccctctgatgatttttttttttttttgctgtgcagaagctctttaagtgtttattttaatatttgtgtaataatgtccagttttaccaagcagaatgatctacataggagcttttatgcagaactcattgttcttcactaagagcttgttagtccagtagtaaaatcaaatccatcctcagttgctatgtggctttgttaaacagttaaacttgagttggagatgctctgctatagggaggaattttcgctccccagatgtgtttgtatataatataatgtatttttcccctctcccctgtggaaactttgtggaaagattatttcagtgttaaccctgattgacattttagtaatcgaacaagtgtttgttactcctttactcattcatttatcaagtgcttaatgggtgccttctgggtgccagacactgcattagactctggggaatcaaagatgaatcacacttagtctctaccccctgggaatttattctggttagagaaattgtaaacacataatcatgatcctatgggatatttttaaagtatgaaatgagataatgtgtgtgaaaaagctttgtaagcttcacacatttaagattttttctccagtgcatagcatgatgtctgacatattttaactgctcgttacactcttgaatgaactggggaagagccaagagttatgagagcaaaatactagagtgtagatggattagttctgcctggatggacaggagggacgcggaggcttccaagaatataacttttgaactggacttggaagtataagttgtttatgttaagaatcgagaaaggaggttctggggggacagctatcagtcgttaaagtgcctggatttagatggaccacaaatctacaggcttatgcagtttacaagatgcttttgtttacagtatctcttttgagccttatgacaggtccatgaagtgagttcatacaaccaagacaagccttgaccagaacctgggttctagggtgtaagagacagcatctggccagtttattctttacactttcacaaatgttatgattgctaatattattgtatttctattattacatttgtgaaagcatggttttctgagttacaagtatatgaaagacaaatgtgtacatgtaataaaatacatagttttctttttttcttttttttttttgagacagagtctcgctgggtcccaggctggagtgcagtggtgcgatctcggctcactgcaatctctgcctccgaggttcaagctattttcctgccttagcctctcaaggagctgggattacaggcgcctgccagcatgcctggctaatttttgtatttttagtagagcaggggtttcaccatgttggccaggctggcctcgaactcctgacctcgtgatccgcccacctcgacctcccaaagtgctggcattatagacgtgagccaccgtgcccagccatggttttcttctgatttctgtaaagcaggttagcttgtattgatacatgaggaggtttttttcagaggtttcaagaaacaagctagaaaatgcttccataatatttcaaagattctttatgattcaagcagtttttcaggattttcagtccatttaaaccatttatctaacaaacactaagtagaaactatgagctctacattctcttgtaagctttctttttctgttatagttgagcaaatttgttgacatttttatttttatatttatttatttatttatttttgagtcagagtctcactctgttgcccaggctggagtgcagtggcacgatctcagctcactgcaagctctgcctccccagttcacgccattctcctgcctcagcctcctgaatagctgggactgcaggcgcctgccaccatgcccagctagttttttagtagttttagtagagacggggttttaccgtgtttgccaggatggtctcgatctcctgacctcgtgatccacctgcctcgacctcccaacatgctgggattacaggtgtgagtcaccatgcccggcccagatgtagctctttttttttttttttttttgagacggagtctcgctctgtcgcccaggctggagtgcagtggcgggatctcggctcactgcaagctccgcctcccgggttcacgccattctcctggctcagcctcccaagtagctgggactacaggcgcccgccactacgcccggctaattttttgtatttttagtagagacggggtttcaccgttttagccgggatggtctcgatctcctgacctcgtgatccgcccgcctcggcctcccaaagtgctgggattacaggcgtgagccaccgcgcccggccaccagatgtagctcttatgtttaggtctttgatccattttgagtcaatttttgtgtgcggtgtaagagaagtgtccacctacattcttttgcatgtagataatgcagttttcccaaaattatttgttgaaaagagtctctttcccactgaatgatcctggcacttttgttgaaaatcacttcaccatataagcgagagtttatttttgaactctctattctctttcagtgctctgtttttatgccagtacaacactgtgttttgtttttgtttttgtttttttgaggtggagtttcattcttgttgcccaggctggagtgtagtggcctgatctcagctcactgcaacctctgcctcctgggttcaagcgattctcctgcctcagcctcccgagtagctgggattacaggcatgtgccaccacacccggctaatttttgtatttttagtagacacggggtttctttatgttgattaggctggtctcaaactcccgacctcaggtgatccgtccgcctcggcctcccaaagtgctgggattacaggcatgagccaccaagcctggcaacactgttttgattactgtagctttgtagtaagttttgaaatcacgaagtgtgatgtcttcaaatttattctttttcaagattgttttgactatttgaggtcccttgagattctacatgagttttagaatgtatttttttttaatttctgcaaaaaacattcttgggattttgacagggattttattgaatgtgtagattgctttggagtagtaacatcttagcaacattaaggtgttgcaatccaagaacatgaaatgtctttccatttatatatgttgtcttcagtttacttcagtaaagttttatgatttttctgtgtacaagtcctgcattttcttcattgctgacttatatatacttgtttttttttttttttttttctgagatggagtttcactcttgctgcccaggctggagtgcaatggcgcgatcttggctcacggcaacctccgcctcctggattggagcaattctcctgcctcagcttcctgagtagctgggattacaggcatgcaccaccacgcccgactaattttgtatttttagtagagacggggtttgtccatgttggccaggctggtcttgaactcccgacctcaggttcctggtgcttcctattgcaccatcttcccagaatcctctcccttcctgttgtgcttttatagccacacctgctttcctcctgccgccagacttagtcgtaactgctaatgtattcctcattttggtaattttgttatctcaaggatgttatataaatgggatgatagaacttgtaattttctgaaggccaggtgcctggctcacgcctgtaatcccagcaccttgggaggctgaggtgggtgggttacttgaggtcaggagttggaaaccagcctggccaacatggtgaaaccctgtctctactgaaaatacaaaaattacagggattaacctgtaatcccagctgcttgggaggctgagacatgagaattgcttgaacccaggaggtggaggttgcagtgagccgagattgcaccactgcactccaccctgggtgacagaatgagattctggtctaaaaacaaaacaaaacaaaacaacatgtaattttctgggattgagttttttacactaagtttaattccttggagattcctccgggttgttgcttagtgtttgttacggttatactgcactttgtttacttatttgctgaaagataatctcagttatttccacttgtaggttattatgaataaaactgttagaaacatcacacaggttttcatgtgaacgtaagtcttcatttagtaatgttgataggtgggtagtgatatctcattgtgtgtattattattattattattattatttttgagacagggtcttgctctgttacctaggctttgaagggcagtgtcatgatcatgtctcattgccaccttaaccctctgagtagctgggactatgggtgtgtgctacactacacccagccaatgtttttagaaatatgtttttgaagagataaggtcttgctatgttgctcaggctggttttgaacttctgagctcaagtcatgctccagactggtctcctaaagtgctgggattacagaccactacacacacctcattgtgtttttaatacgtatttacttagtggctaatgatgttgaccatcttttcgggtgcttatttggtatctttttttaaaaatatggaacactttaagaatttgcatgtcatcactgtgcagggagcatgctaatcttctctgtattgattcaattttggtatatgtgctgctgagacaagcagtagtacctttatatatcccctgttcatcacttttggctattttctttttttgagacggagtctccctatctctactcaaaaacaatacaaaaattagccaggcatggtggcacatgcctgtagtcccagctacttgggaggctgaggcaggagaattgcttgaacccaggaagcggaggttgcagcgagctgagattgcaccactgtactccagcctgagcgacagagtgagactctgtcaaaaaaaaaaaaaaaaagtattccactcttgctgggtggaatgtcctgtaaatgtccatggatccagttagttcatggggttgaagtaaatactcttgctgtgatcatatgtatagttttaacagttgttacagagaaatactgaagtctctatagtggatttgtgtatttcttcattctgttccatcaggttttctttcacagatttcgtagtctggttttttgctgcatacacatttaggaatgttatgtcctcttggtggattgacccctctctcaataaataatttccttcttagtctctagtactttttctttgctctgaagtatactgtttctgatattaatatagtcatccacttttccttagtgaatggttgcatcatataccttttgaattttttttttttttttgctttcaatgtgcttagattgttatattcgaagtaaatgtcttgtacacaaaacagtgttaggttatgttttctttctttctttcttttttttttttttcttgagatggaatcttgcactgtcacctgggctggagtgcaatggcgtcatcttggttcactgcaaccaccacctcccgggttgaaccaattctcctgcctcagcctcccgagtagctgggattacaggtgcccgccaccatgcctggttaattttttatatttttagtagaaaccgggtttcacgatgttgaccaagctggtctcgaacacttgacctcttgatctgccttccttggcctcccaaagtgctgggattacaggtgtgagtcactgtgcctggcctttttttttttttttttttgagacacggtcttgctctgtcacccaggctggactgcagtggcacaatcatggtttactgcagcctggacctcctgggctcaaacaattcccccacctcagcctcccaagtaactgggaccacacatgtgcaccatcacacccggctaatttttttattatttgtagggacgaggtcttgttatgttgcccagcctggtctcgaactcatgggctcaagagacccttctgtcatggcctcccaaagtgctggcattacaggcgtgagccaccatgcttggctgtaggttatgttttttaaatctagtttgtcaatctttgtctttttctttttttttttttttttgagacggagttcatcactctgtcacccagggtggagtgcagtggtatgatctcggctcactgcaacctctgcctagtgggttcaaacaattctcctgcctcagcctccagagtagctattacaggtgcccaccaccatgactgcctaaatttttttttttgtatttttagtagagacagggtttcaccatgttggccaggatggtctcgaacaccgaacctcaagtgatctgctctcctcagcctcccaaagtgcttggattatggttgtgagccattgcacctggccagtttttgtcttttatttgctgtttttaggtatttgggtcatttacatacttacagatgttgtcagaatccttttttttttttttttttttttttttttgagacaaagttttactcttgcccaggctggagtgcagtggctcaatcttggcctactgcaacctctgcctcccgggttcaagcagttcttgtgcctcagtctcccaagtagctgggattacaggcatgtgctaccacgcccagctaatttttatatttttagtggagttggggtttcaccatgttggccaggctggtcttgaactcccggccttaggtgattcacccaccttggcctcccaaagtgctagaataacaggtctgagccaccacgcctcgttttagttttagttttttgattgttctttttcctgctttcttttgagttacttgaacatttttggaatcccatttttcttgtcgtattttttttctaccccaattcactacgccaaaaccatttttctttattgtattttatatctgcttattttagttcattgatatggtttggatatttgttccgctgaatttttttttcttcttttttgagacaaactttcgttcttgttgcccaggctgaagtgcaatggcgtgatctcagctcactgcaacctccgcctcccaggttcaagtgattctcctgcctcagcctcctaagtagctgggattacaggcatgtgccaccatgcccggctaagtttgtatttttagtagagacggagtttgtccatgttggtcaggctgttgttctccaactccagacctgaggtgatccacccacctcggcctcccaaagtgatgagattacaggcgtgagccaccatgcccggcctaaaaattgtttttgggaggccaaggtgggttagtcacctggggtccggggttcaaaaccagcctggccaacgtggcgaaaacccgtctctactaaaaatacaaaaattagccaggagcgatggcggcacctgtaatcccagctgctcaggaggctgaggcaggagaatcgcttgaacttgggaggcagagcttgccgtgagctgagatcatgccagtgcactccagcttgggcaacagagcgagactccgtctcaagaaacaaacaaacaaaaagcaacaacaaacaaacaaaaaattttttcagttaattctgatgtatctgtgagatattagaattaagatatcttgatgtttgcatttgtttattgcctttttccattcaatttgaaatcttctggattcttcatatctttttggtatcacaaataacttttgattgaaacctgggcatttttgtgttgtcatgagactatgcatcttacttaaacaactgttttagtttttttgtttgttttttttttttggagaccatctttatcacccagtctggagtgcagtggcgccatctctgctcactgcaacctccgcctcccaagttcaagcgattttcgtgcctcagcttccggagtagctgggactataggcaccggccaacacgcccagctaatttttatttttagtagaggcggggttttgccatgttggccaggctggtctccaactcctgacttctggtgatccacccgcctcggccttccaaagtgctgcgattataggcgtgagccatcgcgccgggccctgttggggattcttttttttttggtctgtgttcatcggtgtcctgatgtactcacttcttccattccaggagtaggatacattaggcaaaaagaagaatacccagggaatttactgctatattgtgccttgtgtcctgtgatcctgagctaatttgccttctctccacctttcagagaatattcgttttatttacaatgttcacattttaaatttgtacttagtgggaggaatagggaaaagtatgtccattccatcgtcccagaagtgtaagtctaacctttgatttcactgagtgtgccctatttttctgttttctatttcattgacttctgctcgatctttcttttgctcttctagtttcttaaggaacaaggtgaagtcactgatttgtttcttttctaatatagtcatgtaattgtataaatttctctttcaatcactgctttaactgtcttaaaatacttgatatatttgtcctttttttaccccttggtgttatgggttatgttatgttatgttatgttatttattttatattttgagacagattctcgctctgtcgcccaggctggagtgcagcagcgtgatcttggcttgctgcaacttccgcctcccgggttcaagcaattctctgcctcagcctcctgagtagctgcggttacaggcgccggctaccatgcccgggtaatttttgtatttttagaagagacggggtttcaccatcttggccagaccggtcttgaactcctgaccttgtgatccacctgcctcgacctcccaaagtgctggaattagaggcgtgagccacagctcctggcccccattggttattttaaaagtatgttttgatttcaaatatggggattgcctattgatttttttttctgtcactgatttctaaatatcatagtggtaagaaaaaaatcatgataagacttcaaaccttttaaatgtaccaagagttgttttttttggcccgaatatggtatatcttggtgaatgttccaaatgcacttgaacagaatgtgtattctggtaggttgtgtagagtgttctaaagttagttaggtcagtttggtgttattcaagcttctgtatccttactgattttctgtctgctggtctggaatctctctctgtcgcccaggctggagtgcagtggcatgatctcggctcactgcaacctccatctcctgggttgaagcgattctcctatctaagcttcccgagtagctaggattactgttgtgtgccaccacgcccggctaatttttgaatttttagtagagacagggtttcaccatgttggctgggctggacttgaattgctgaccttaggtgatccgcctgcctctggctcccaaagtgctgggattacaggtgtgagccaccacgcctggcccacccagttaatttttaaaactctttttgtagagacagggtctccctgtgttgctcaggttggtcttgaactcctgtgatcaagcaatcctgtctcggccttccaaagttcagggataacaagtgtcattcaccatgcctggcctggttctattacacagagaggtttgctgaaattttaaaatataattgtggattctttcatttcttcttacagttctctcatttttgctttatttattttgaagccctgttattaataggtaaataaatgtttaggatttttgtgtgttcttgatgaattaaacccttaatgtatataaaatgatgctcttttttcctgataaaatttttatttttgtccactttacatgatagtattataacgatttcaactttcttttgattttgtagtgtgtaataagatctttttcttggctgcactggaattttaatttctgattgtagtcattttggtcatggtttaccctgttttttggagatgggcttttactctgtcacctgggctggagtgcagtggcatagtcatggctcactatggccttgacctccttctgccttagccttcctgagtagctggaaggaccacaggtgtgtgccactacccgtggctaattcttttttttttttttgagacggagttttgctcttgttgcccaggctggagtcaatggcacgatcttggctcaccccaatctccaccttccgggttcaagcaattctcctgcctcagtctcccgagtagctgtgattacaggcatgagtcaccatgcccagctaattttgtattgttggtagagatggggtttttccatgttggtcaggctggtctcgaactcccgacctcaggtgacctgcccacctcggcctcccaaagtgctgggattacaggcgtgagccaccatgccaggccatttttcatgtgtgtggtgtgtgtgtgtgtgtgtgtggggggggggtatgtatgtttttagagatgggttctgcagcgttgcccacactggtctcgaactcctggcctgaggcgattttcccactttggctgcccaaagtgctgggattacaggcatgagccactgcgctcagccacttttcttcatgtttctagcgaatgataattcattaaaagagtgccttgttatatatgcttataatttccctcaaatatgtgaaaagttgttggccatgatttctaaaaaatttttttcaatattatctcctgttttgtggctctagttacaaatatgtttggcctcttgaagttatttcaattatcacgtattacattttttagtgtttttttctgtgtttcatttaggttagtaattttgatttcatgtgttgcaaatttcaaagtgtatttttcatcttagactttgtaattttcatctttagaagttcaaattttaaaaataattcatatttttacttaatatgttgtttcttctagccttctcatcatatgaaatatcatcataattgttttaaaggacttgtctaccaattctattttctgtttcatttcaaaattggtttgttttttgtttcattatggggtataatttcctgcttctatgtaagtcttataaatttggattggcttttgagccagtgtgaattttaccttgttttctagtttctctagttttgtttgccttttaaaaatatttgtggactttgttctgtggcattattaagttgcttgaaaacagtttctttctgttgggtcttttatgttttccttgattggaccagggttgtgtttagggttaaatttttcctccttctgaagccttttctttcttagtattccaatgtcacatctccaatgtgatataaattatatcacgtcatttccttttggacttttgggtgtgggtactatacacatccttaagtcagtcctggatgctattacgtctaattgttttggtgatttctcaccttgcccttggacagctcctttacattgcaagtgctgatttgtcattcaaccaaaagttctagggtgagcccttgtagatctcttcatttctctctctctctccagctctctactcagtgctggtctcccttgtgagctctaggcaccttggcctccttggacttccagctccatttcctcaacttggggagacgacaggctctgcctgggttcctcctccctgttccacgacctggaaaactctctcaaggcagtaagctgggcacacgtgtggcccgtttgttttttgtcttccagggatcactgtcttttgttacttgtccaatatcttcagtgctgttgtttcattcattttattaggtttttattatttcacgcaaggaggctaaatctggtcccctttattcactccatcttgaccagaagtggtatcactgtggtttgaatttacattttcatgataactggtgatattgagcacgttttagcttgtgtgttggccatttgtgtgttctcttttgtgatgagtttgttcattttgcctttactgttctttgttttcgtttttcatctatttgagttgcagaaggtgtttatatgtcctaaatactcatcctttgttagacaaatgttttgtaaatactttccccaagtctatgtggtttacccatttatttatttatttatttatttatttatttatttatttttgaggcggagtctcgctctgtcacccaggctggagtgcagtggcgcgatctcggctcactgcaagctccacctcccgggttcacgccattctcctgcctcagcctcccgagtagctgggactacaggcgcccgccactacgcccggctaactttttgtgtttttagtagagacggggtttcaccgtggtctcgacctcctgacctcgtgatccgtccgcctcggcctcccaaagtgctgggattataggcgtgagccaccgcgcccggcctatttattttaactgtaccttttgatgagcagaaatatttatatctgctaggtttaatttatcagtgttttcttttgtagttattgcttactgtgagctaagacacttttgcctaacctcaaagtcttgaaggtaatttcctttgtttcctgtaaaagggcttgcttttgctaatttatatttaggtctgtgatgcgtctgaagttatttttgtaggtctgagttttttgcatgtggctatccagttgtttgtcaccatttgttgaaaagagtctccttttctcaccgggttgctttgggaacatcgcgtggctgcctaagtgggatctctttcagaaatctttattctgcttcaaaaatctgtttgtctagccctgttagagtattcggattatttggtaactttatattgtcttgaagtcagaattgcaagtcctaaaacctttttcttctttttcgaagttctgcatactctacgtccttcacatttccgtataaattttaatcatctcttttctgtcttctccaaaaaaggctgatgggatcatgattgtaattgtcttgaatctgttgatcagtttgaggagaactgacatcttaacaaccactgagtcttagtcattagtatagtatatctctccatttatttaggtcttttttgttttgtctgagcagtcgtttgttgcttttagcctttggtctcgcatgtcttctgtttttaaaattacttattttttttcctttttgttgagacagagtctcactctgtcgcctagctggagtgcagtggcccagtcttggctcactccatctcctgggttcaaacaattctcctgcctcagcctcccaagcagctgggattactggcatgtaccctaagcccaactaatttttatatttttagtagagatggggtttcaccccgttggccaggctggtcaactcctgatctcaaatgatctgcctgcttcggcctcccaaactgctgggattacaggcatgagccaccacgcctggcctaaaattatttttatttttaagtattttgtctttttttgatgctatttgtattttaaaatattaaatactttttcagcaattatgaagtattataaaaatttctaattttttgttggaaatagaatttttgtatattgacccgtttcttacaaccttaagtcatattaattctacgagtttttttaggtacatttcttagatttttctaatagatgattgtcataaaacacagttttatctctttttttccctagttgtaatgccttttattctcttccctcacagaattgacttaatcttgttttcattctttgaatacagcattcagtgttacaccactaattataagtcagctgtaggggttttattgatgaactttatcagattgttttcaaatataggttttattactgtttagatatgacaaggacaacagaacccaacataactgccattgaaaagatagttatagtcacagaccctaagaggaataatcatgccatgccatggagaatacacagttgagtaaggtctagccctagcttcctgagggtttatgtcctgaatggatattgagttttctcagaagctttttctgtatctattgagataatgctatatatttaaatatattaatgtaaatttcattgttttattttcaaatgttatactaaatgccatttggtgtcatggtgtattattattattattatttttttggagatgggtacagtggcacaatctctgctcactataacctccgcctcctgggttcaagtgattctcctgcctcagcctccggagtagctgggattacaggcacgtgccaccatgagcagctaatttttttcgtggagacaaggtttcaccatgttggccaggcaggtctcctgacctcaagtgatcctcccgccttggcctccaaaagtgccaggattactttcgtaatctgtgtgagccatcgcaactggcctattcctcttaatatattgttggatttaaattgctaatagtaaatatttgcgcatctttgtatgtgagggattttggtgtaaccttgctgctttttgtcaggtgctggtatttttggcatatgcattggtattcttcatgctcaacttagaaaatgatttgggaagcattgtcttctctgttttctggaaatgtttgtgtgagattgatgctattttttctttagtgtttgaaggaacttatcagtgaaaaaatctgagtctagagttttctttttggaaaggattttgataattcaacttaaaatgcttctcagatattctgttttatcagttttgataagttttgttttcaaagaatttcttcttttcatctcagctgttgaattagttagcatgaagtcattaataataatctttggccctcaatacctttgggatcgtagagctaattccccttttattcttggtaatttgtattcttcctctttaaaaataaattaatttcgcttgcagactgtcaactttgtaggtctttccaacgtgttaccagaaggggtcccaatccagaccccaaggagaggttcttggatgtcatgcaagaaagaatttggggcggattcatcaagtgaaagcaagtttattaagaaagtaaaagaataaaagaatggctagtccataggcagagcagtgccatgggccactggtttcccatttttatgagtatttcttgattgtatgctaaacaaggggtggattcttcatgagttttctgggaaaggggtgggctattcccagaactagtggttcctcccctttttagactatatagggtaacttgctggcattgctatggcatttgtaaactcatggcgcttgtgggagtgtctcttagcatgttaatgtattataattagtgtataatgagcagtgaggatgaccagaggtcagttttatcaccatcttggctttggtgggttttggcccccttctttattacaacctgttttatcagcaaggtttttctgtcttgtatcttgtgccagcctcctatctcattctgtgacttagaatgcatgacttactgggaatgcagcccagcaggactcagccttatttgacccagcacctgttcaagatagaagcactctggttcagaggtctctgacaaaaggaccagctttgacttcaaattttctgttacttttctgtttcatttcttctgctcttatttttactatttctttttttttttctacttactttgggtttactttacccttttatatataggttctttaggtagaaccctacatattttattttattttattttattattttattttattttattttattttatttcatttcatttcatttcatttcattatttcatttcatttcatttcatttcattttattttattttatgacagagttttgcgctgccacccaggctaaagtgcagtaatgcaatcttggcttactgcaacctccgcatcccaggttcaagcgattctcctgcctcagctcagcctcctgagtagctcggattgcagccatccgctaccacgcccagctaatttttgtatttttaatagagaaggggtttcaccatgttagccaggctggtcttgagctcgcgacctcaggtgatccgcctgccttggccttccaaaatgctgggattacagccgtgagccaccgcacccggctgctaggtcattcatttcatatctttttttctaatgtggttagggaacataatctgtatgattcccattattttcattctattgtgtccagctttgtggctcagtatgtggtctttcatggggaatgcaccaagtttacctgaaaagaatgtttatagtggttttaacattgctagatgatgatgatgactattattatttggtctggttttgtcaatcacaaagagggatgctaaaatatcttaccatgtttggggcactgagtattctgactgtttatgccttatgccaaattttccttcatgtattttgaagccttgtttttaggtgcatacatttataattattatgacttcttcattgtctgacttactgtgaaatgtccctccctctctttactatgtagccactcaccatctttttgttgttgtttgtttgtttgtttgttttgagatggagttttaatctatcacccaggctggagtgcagtggtgtgatctcggctcactgcagcatttgcctcccaggttcaagcagtttgcctgtttcagccatcctagtagctgggattataggtgtgtggcaccatgcctggctaatttttgcatttttagtagagacagggctttgccatgttggccaggctagtctcaaacccctggcctcaagtgatcaagtgcccgcctcggcctcccaaagtgctaggattacaggcatgagccaccgcgcacccagcctatccatttactttggacctgtttgtgtcttcccttaaagtgtgtttcttacagacaccttgtgattgagttttacttttctatgtgtgctaatacactatttttttttgagagtctctacgtcactacaatcaattttagaacacttggatcccctcaaaaagaagccctttggcccattaacagtcactctccattaccctacttgcccagctcctggcaatcactaatcttcattctgtctccatccctatttgtcacatttcatataaatggaatcatttggtgtattgtgagtggcttctttctcctagcatcatgtacaagcatttgttttgtagcatttattagaacttcattcctttttgttgtcaaataatattctattgcatggctatactacattttctttactcattcattaattgataaacatttaggttgtatatacttttgcaatattatgaataatgttattattatgaacatttgtctgcaaatccagacatttgttttcaattctcttgggcctaggatttttgtttcatgctgcaactctgtttaaccttttgaaaaactgacaaagaggctgtaacattttaaattaccagcaacaatatatgaaggttttaatttctccatctctttgccaacattttttattgtttggcttttgattttagctatcctacagggcatgaggtagtatctcattgtggtgttgatttttacttatcttttttcattatattcttttgtagacagagtctcactctgttgttcaggctggagtgcagtggtgtgatatcttggctcactgcaacctctgcctcccgggttcaagcgcttctcctgcctcagcctcctgagtacctgggattacaggtgcccgccaccacgcctggccaatttttgtatttttagcagagacggagtttcaccatgatggccaggctagtctcaaactcctgacctcaggtgatccccctgcctaggcctcccaaagtgctgggattacaggtgtgagccaccgtgcccggcccctttgttcaatttttaactgggctgtatagctttttatttctgagtggaagagctctgtattctggatacaaactacttatcagacatatgacttgtaaatatttcttccatccttttactttcctgatgattttgtttgtagcaaaaaagtctgtaggtttggtaaattctagttattttttcttttgttgcctctacttttatctagtgttatgtctaaaaactgttgttcaaccaagtcctaaagacttacctcctatgtttttttctaaagttttattgttttagctcttacatttaggtctgcgattcacttttgaattaattttttaatatcaggaagggtttcaacttaattctttggcacatttctctagcaatttaaatatatttctttactcttttcagtctgtttttatagtattaccacttctgactaatattgtacaagttgtaaagtatacaaagcttgtaagttgttcttttatatcacctctgtttgttgtcagttatgctattgtcatgtgtgttggaactatgtacattataagccccagaaaacaacaatgtaattttggctttcaataatcatgtaatgttaagaacttaagagctaaaagtcatctaagtttacccagatatttaccatttgtggtagtcttctttgtcttctgaagatttgcattttctagcatcatttctcttaatcctgaagaatttctttagcctttcttgcagggcgtatcttttggtgataaattgtgcttgctttcttttatctgaaagtatctatttcacctctatttttgaagggcattgtggttggatatagaattctgtgttgacagtgccttatcttttagcaaggggtattttagtttattttcttttggcttccatattttatgatgagaaatctgccgtttatccagtcatggttccctctgtgtaatgtgacattttcttttggtgcttcaagagttttccctctgtgtttgctttttagcaaggcatttgactattcgaggtttgctgagattcctgaatctgtggatttgtcttttttcaaattgaagaaaatttcagccatcatttcttcaaaagttcctttcctgcctcatattctttctgtcttcttttttaggcctttggttatgtatgtaagaccttttggtactgtgctgtaggtccctgaagccctgttttttgtttgtttgtttaacctctattttctctttcagattagattcttttttttttttttttttttttgagacagagtttcactcttcttgcccaggctgaagtgcaatggtgggatctcagctcaccccaacctctacctcctggttcaagcgattctcctgcctcagcctgctgagtagctgggactacaggtgtgtgccaccacacctggctaattttgtattttttagtagagatgggatttctccatgttggtcaggctggtctcaaactcctgacctcaggtgatccacccatctcggcctcccaaagtgctgggattacaggtgtgagccaccgcgcctggcctcacattagattctatctatcgatgtagcttcaagttcactgactcttttgtcatctcagatttgttgttgtgaagcttgccgagtgaaattttcacttcacatgttgtatttttagtatttaaaaaattctatctttttttttttttaatttgagaccgagtcttgctcttttgcccaggctggagtgcagtggtgcgattatattactgcagcctcaaactcccaggcacaagtgattctcctgcctcacccttctgagtatttgggactgcagattggtgctaccatgcttggcttatggtttcttttctttttttttttttttgttgttgttgttgctgagacaccctgttttattataggtttatctttggtgggcagacttgattagcatttagcgacatttttctataaaatttcacattatagaccaggcgcggtgtctcacgcctgtaatcccagcactttgggaggctgaggcgggcagatcacgaggtcaggagttcgagactagcctgactaacacagtgaaaccccatctctactaaaactgcaaaaatcagtcgggcgcggtggtgtgcacctgtaaccccagctactcaggaggctgaggcaggagagtcgcttgaacccgggaagtgtatgttgcagtgagccgagattgagccactgcactccagcctaggtgacagagtgagactccatctcaaaacaaaacaaaacaaaaaaacacttcacattataaaggaaatggtatagtttgcaatagaggaaagaaatcactcataatcttaccatccttaccacagtcttattaatatattttgtggttttttttttttttttttttgagacggagtcttgcagtgtggcctgggctggaatgcaatggcgccatcttggctcactgaaacctccgcctcctggcttcacgcgattatcctgcctcagcctccccagtagctgggattacaggcgcacaccaagcctggcttatttttttttgtatttttagtagagatggggtttcactatgttggtgaggctggtctcgaattcccgacctcatgatctgcctgccttggcttcccaaagtgctagaattacaagcgtgagccactgtgcccagcgtattttgtgtattttcttttaatgttcagtgaatttttattttattataattttttttttgagacggagtctcccgctgtcacccaggctggagtgcagtggtgcgatctcggctcactgcaacctccgcctcccgggttcacgccatcctcctgcctcagcctcccgagtagctgggactacaggcttgtgccaccacatccggctacttttttgtatttttagtagagatggggtttcaccatgttggtcaggatggtctcgatctcctgaccttgtgatctgcctgccttggcctcccaaagtgctgggattacaggcgtgagccactactcccggccagatctttttttttttttttttttttgagatgagatcttactctgtcacccaggctggagttctgtggtgtgacctcagctcactgtagcctcgaccccctgggctgaagtgatcctccgacctcagcctccctaatagctggactatagtctcacgccaccatgtccagctaattttttgtatttttaagtagagatgggtttcaccatgttgcctaggctggtcttgaacacctaacctcaagtgatccacctgcctcggcctcccaaagtgctgggattacaagtgagagccactgcagccggccagacttttataaaagttgtatggttataaatggttatataaaatatctttgtgcatacattttcatgtcttgaagataaagtatataaatgatataaaagacacaaaggtaatttatacatgctatatcttatattatttgctttggctctctaaaagtgaagcaattaaatcagatttttttccttgattcttattgcttaactgctgtccaaaagaataggattatggtgtcatcgaaattatataaaaatgaattttgagttttttttttttttgacagagtctctctctgtcgcccagactggagtgcagtggcgtgatctcggctcactgcaacctccgcctcccggattcaagtgattctcgtggctcagcctcctgagtagctaggattacaggtgcctgccaccactcctggctaaatttttttttttgagacggagtcttgctctgtcgtcaggctagagtgcagtgttgggatctcagctcactgcaacctccacctcccaagttcaagtgattcttctgcctcagcctcccgagtagctgggactacagccatgtgccaccacacccagctaatttttgtatttttttttagagatggggtttcaccatgttggccaggatggtctcgatctcttgaccttgtgatccatctgccttggcttcccaaagtgctgggattacaggtatgagccacagtgccaggcctaatttttgtatttttagtagtgacagggtttcgccacgttcgccaggctggttttgaacttctgacctcatgtcatccgcctgacttggcctcccagagtgctggaattacaggcatgagccatcacgcctggcctattttttaaaattaagaccttttttttttttttttttttttttttgagacggagtctcgctctgtcgcccaggccggactgcggactgcagtggcgcaatctcggctcactgcaagctccgcttcccgggttcacgccattctcctgcctcagcctcccgagtagctgggactacaggcgcccgccaccgcgcccggctaattttttgtatttttagtagagacggggtttcaccttgttagccaggatggtctcgatctcctgacctcatgatccacccgcctcggcctcccaaagtgctgggattacaggcgtgagccaccgcgcccggccgagcttggcatttttatctacctcattctaccgatgaggaggccgagtctcagagagttcacagacctgcctaaggtcactcagctagaggtgatacaaccagggtttgaactgagatctgccaagcttctgagtttattctttttcccccacaccaaggatcctcaattctgccttactgacatcaggatccggtcaattctttgtgatgggggctgtcctgcacctggcaggatgtttagcagcttctctggcctccacccactggatgccaggggaatgcagaagaggcttgttcattctcccatttaatcctcaggacaatatctgacataaatgttacgtcttttattttataaatgaagaaaatgagactcagaaaggtttaagtgagttacttaagaacacacagacagcaagaggtagaactggaaaccgaacacaggtgtccacatgggacaacaaaaaagttcacgttccatcttcttttgagtctctcatttcaataatgaccattgtgtggatatgagctgaagtacaggaaacctggggctgaactctcctcccatcaggcctaggagccccagaccagaaccccagcccaaggtctcccagtcaggcccgctggcgtgagctggcatctacactagcatggtctcccaaagctgcagggatgccagtctcgccgctgatgaagaaaatgaagggcatttgcttctcatgcaggctgtcgggatttaacacagattccttttcttgctgtcttctcccatagcacaaaactgggtggtccatccccctcccagtgtcccaaggctttgttgcgtgttctctttaatttctcccactcttgtggtgcaccctaccctcatctccctggcaacctttctgctgtatcctctcgacacctggatcacaagaacacttgtgagaccccttaacaagttacatcccaaattatcattcccctttgtcctcagccagtgctcaggtccaacttgctctcctggggtgactttctttcctgcccaatatggtttcatcatctgtaaattggggataattaaagtcttgatcctgatatttgactctcaaagcagaagtagcaagctcagccaagtcacttcaacaagaggagaagttccttgtgaaccaaaagggcactggtcacaagggccgctccttcttctgtcaggcctctccagcacacccttggctcagccaaagaagagactcaggctgtgcttctgcactgttgggataacataggcctcttccatgtggttccacaccaggaacatggggacaatcagacctctcccagtgtgggcataaggatacaagatcatgtcaatattgacattcataatggctgggcgcagtggcacacgcctgtaatgccagcactttgggaggctgaggtgggcagattgcttgaaccccagagttcgaaaccagcctgggcgacttggcaaaaccagtctctactgaaaatacaaaaaattggctgggcttggtggcgcacacctgtagtctcagctacttgggaggctgaggtgggaggattgctcaaacccagggaggttgaggcttcagtgagctatgatggcactgctgtactccaacctgggcaacagagtgaggccctgtctcaaaacaaaaacaaagacaaaacaacattcataatagtagcaatagctactatgtgccaagcccaggcacctctttgagtctttgctggcactctatcaggtaagcgtgcttagaagttacacgaagcccacggctcagtgtttggcccatggtaaaggcctaaaaagggatagccccagtggtggggatgctgctgctgctgaccattaaccccagtctgctccaccttcttccaggcagtctgtgagatgtttcatgtccgaggcaaacagcacattcagatccccaagctctacacctccagtgtgaccaggcacctgcaccacttcaggctcatgcaggactcacagcctttggacctcagctaaaggacttgcttctcttcagcacacggggcttgtttgtgttggggtctgagccctgagcccatggtcaaggagacccccaggtctttctgaacagagacagctggcctgggggcctccctctcactgcgtgcaagaggctgttagggtgcaagactcaaggcgctgagggaggctgtttcaggagggagccccaggagggtggtggagacagaagggggcagcatctgccaaggccctactgtgtgcctggcaccgtgtggggtttctggcccatatgggctaagtgaccctgcacactcctcttaggagagaggctcagatggagaaattgcagttcaggaaggtgaagcaagctgctagcctgtggccatgttgggatctgggcctcagccttccagccacgaaggcagccaagtgtcatgaagaaggcatcacagaggcaattccaggctgtagtggtgaactttccactctgcatccccgggtgctgtgccctgtgccctgtctaaggtagccctgtgggtttctatatgtttaaattgtccccagcatcaatgatgctctcctgtggatcccaagccatggagatgtcctgggacttttcatttttaggtacctaaattgaatttcccaacacacagaagcaagacagccgccctaacagactcttgcatgcagtgagagggaggccgccaggccagctgtctctgttcagaaagacctgggggtctccttgaccatgcgctcagggctcagaccccaacacaaacaagccccgtgtgctgaagagaagcaggtcccttagctgaggtccaaaggctgtgggtcctgcatgagcctgaagtggtgcacgtccctggtcacattggaggtggagagcttggggatctgaatgtgctgtttgccttggatctttatttgtgattcagaaacagtggaataaaaggaaaggaaagaaaacctgaatggccacctcagcaggatgctccaagggtagtgtccaggtggcactgactcagatatgtgggggcttcccccacccatgctcaagagccactttgccatttcaccatctctctgtcctccacacccctcagcagcaagcacaacaagaatgtgttcaccatgaagctcaaatctcagcagaatctagagtctgaaatccaagtaagggaaagtgtagagcttcttggatgatgccctgtcaattttattttaacgaatgaaagaccagaagaagtcagtcttgaaaggagaggacaggagcatctgctggcattagcagccgtgccatcgtaggaccgactcacctggacccgcggccacctgtgcttttacatctagtcttggttaaccatgggccacttttccagcttggaaactaagcatatgctccacttcctctccttcctcattgaactctttcactaaaagaacagtgcaagagagacttaaactgtttgcctcattcttaagacctttcaggaaaagtgttggcagggaaggaaatctcccagctctgggaaacagtcttgtggattatctgctggtttcattgatctgtgctgtcctccctgcattcattaggaaaactggccttggttcaaataagaacaggatttgtcctggtgacagagaaaggtttcttctgatgtccatatatctccgagggggatgctttctccaggcagaggctgtggccaagcgatcggggggctcagagggctgctgggaaggggtgggcccctctctccccagagggaaactcctggggacctctcgagcacccctgcccatcctttaaacataaattcataaatacaaacaagtaggccattcacagaaatatataaaatatgtcataggacgggtggcactctcatatggcaataattatgacaggggccggcaaatgacctgagtgacccggagtgacctgagcactgactcccaaatgccctccataggatgttctgcatccccgagaccctttcctgggtcctcctgggccctaccaccccctagaccatccagacctcaggtcatccccctgtctgttgacagagtagtctccgttcctgaatgtgctggtcaccagcaacagcagctactcctcctccaggaagctcagcctatacttctacacgcagagaacctggacggcacccaggtggacctaagccttcagctcccagtagacgctctgggtttcctaccctgcccagacactctgggcttccccccacacctcccctcggccggggctcctgtgtgcatctgtctctcccagtgcccagcacaggcgtggaacggaagaggtgaatggaccgatttgaacacatcatcctggattctccgttccctctcaagccctgcagctaacccatcggcaagccctggaggctctgcctccaaaatcctgcctatcccatgtgcaaacgcctctcaccacgtccactgctatttgcagttctgtgtgtgtggaaatacttccaccaatttggaatgaacaggtcacagctgtgcctggagggaatggccagggaaatgtgccctcgccttgctgttctatccaggcccacccagctgaggatgggggacctgccaccactctcctggcagttccggactcctgggaaccggcaggtgaggacccaagagtgttttcagtgacccggctgacctggtcatccgtcagtcccaccttggcctaggcctctatacagcacagatcacagctcatcccatcctggcattacactggcctgtgccctgtcctcagggtcacatccgtctcccagaagccgtgcaaccctggaaaacccaggtctaacagtcaggttcctcctccgtgcattaacaatggcgttgacgcctgctttgcggcacgctgggaggggagagggaggtgtatgctggagagctccccaggggcaaggcctggctctgcgtcacccactgtcagatcctgagagcctggggctggcccagcacgtggccaccgttccctaagagttggatttcatccctcagtgctgaaggcaggggatagagcttagacagaccccctgcgtcctgtcttctttatctacagctttctcttccttgcccctttcacgtgcaccctgcagagcaggtgttcactgagcttgagcaaaattcaagctagagcagctgatggatcttgaggcctagattcactgtcaaagtgtttctcaaacggtgctctccagaacaccaaggaaaactcattgactgtgtaagtctgaaaatccctgcccaccggtctacctttgtgtatgagcaatcagctctaccattcagcccaggtgtgtgtttgctggaccatgtggaggaagctgaagagacgtgagctgaaggcagagggtgagtccaaggtgggatcttgggacaggtacgagaagttaggcaaaaatgggataattctagccttcataaccttagataatagttcacattattatttagttaatagaactgtacccacattaaatttcttaaatttttttaagagataaagtctcactctgtcacccaggctggagtgcagtggtgcaatcatggctcactgcttcctggaactcgtgggctccagcaatcctcctgcctcagcctcctgactaggtgggactataggcacacgccaccatgcctggctaatttctttgacttttctctagagaccgggtccacctaggtttcccaggctggtctcagacttctagactcaagtgaacctgaacctcccacctcgacctctcaaattgctgggattacaggtgtgagccaccacacccggcctaaatttcttatgtgccatgggactgcaaaacatcattattaggggcagctggatggaaggtataggaggatactatagtgccttttcaatatttctgtctaaaatctaaaatcatttcaacaggaaacatttatttcaaaacatgaaggtggttatccttccatgagtttgaagtacaaaggcaggctcacggtgtcgtcagaattcagaacgatggtcgtggggctgggggtgctgggaggggctgggcatggttggctttgtgatctggggtctggtgtgttccatctctgaatctctctcgagctgcactctttcttaatacattttcataagtttaaccaaaaataaaacgaggatgcgaagcttgcttgggttgttaagcctagggaaattatccagccatgagccctggcccagatgcttctagaagcctggagggaactgagaactttccaagtggaggccgcagaggcaaggccctgaggtgggagcacactgctgttcgtccctagctctgaagggggtgccctggtcggaatcagtgctgggtgcagcgaaagccgatctcacccgctccgcagggtgttcaggcctgccagcagggggccagctggtcctcctgggatatggcacggacccagcagctctgtctgaaatcataatggcggaaccaagggccctctacgtccaggtcggttgggaggcggggcatggagttccactgcaggaatctccaggaaccctgaggtcctccctgagccagggccgggctgggcacaccctgagtgcccacagggtaggtgtcttcccggacagccccaccaggacagggtgtggaagaacgaggtgcccgtggcggggaagctgaccaaatgggccgcgggaaccgggctggtgggcctggaggggcctgtctgtcccccttgcagagggtcttcccgccacgtgaagccggcacaggcctggatgccgacgacccttgctcgggtttggctgaaaggaaaacagacgcggtcagcatctccagtgagcccacgcaggcctttccgggctgggccccacctgcctgcgtctctggagtcctcggggtctctgtgtggcccccgtggcctgacaccgaggacacgcctgtagtctgctgatcccagagggaggggtgcatgctgcctggcgtggggaagctgtcgtggcatggcgggtggctcctgggactgcccccagggttcagactggctgggggcttcctgccacacaccttcgtcccagggctgttgggcctgggatacggcccccagtcagaactcaggtgggaggggccttggatgtcacccagccccttgtcacctcacgtggggacccgtctccgcagtgggtgattgggcccggacgtgggtcaccctctgccctcctgggctgcccagtccatgccaggactgaccgttcccacttctggctgaactcttggctctggctctgggcccggggtcccgcctgtgccctctccctgaatgctctgtgggtcagggacacggattcccttgtctccctggctccaggcttcttgtcctggcaaccttggaggagcgtgcaggagtgaggggcctctgctgctctctgaggctgtgggtgcttgcagggaggggcggggtctcccacaaatgggtctgggctcgtctagtaacttggagggccctgcgagggggagagggagacaccgtggaaagtgggagggggcttgttggagggtcttgcccacatccccctcctgcgtgcacagcatgtccagtatacacgcactgagcgcctgccctgaggaccggtgggcctcctgtactttcttagagtccaggaggaagaggaggaagaaaaggtgaagaggaaggcccaggtagtagggttgcgggtcccgggcactcccctactactgactaccccagagggtgacatgggaggggacatggcactggagcccacctgggggtggcacgtcccccttctttcttgttagtttcttcatagaggccctaagatgcttgagcacagtgtcctcatccctggcccaggtatcaacgaaccggttgcaaaaacgtgcccacgggccacacctggacgtcttcgtgaggcgctctagggacagggtggatatcaggccaggggagttacctgggaatggtcacagctcataccccgtggccacttcagtctcctactgggcggtgccggatccttttgtggccaccccaggtgtccagatatacacaggagactgtggctggggggcgatccggacagggaagtgctcaccacactctcgactttcatctgggtcatgtgggggatgggctcggtgtcacagtgtcctgcccagcccacctggccagacctccctctgggccagaacagaggatcatgaggacagtgtgaggaagctgccctcgggccagtcggggtctgaccccagggctccccaggccccgctgggcacacgtagacttactctgctgaaccttaaaggcgattcttgttatcggcatcaacgcctgttcgccttctaccagatacacgtcccacaggcgcagggtgagcccgagagagatctgtggggacagcaggtgtgaaagaacctggtccttccaggctggggctggtggctcgagctgcgcacactggggcttcagtctccagagtcagtgaccttccccatgagggtcgcctgagccctccaggacgctgggtcagacaaggtcttgaagctcctcatggggggcactcatttgagtggggatgtggctcctggagagaggggcttgcccagggcttgaggcttccctgagccctcacaagtcgggtcctggcccactctgcccatgaggctgggcctgagccccagccatggccctgggatgaccccccttgggcagagggttttgcttgtgtgtcctttggggacccgcctgagcctcctgtgggctgggagtgagccagacccccgggctggggaagcagggcactgcagggcaaggaaggtccctgagccagggtctccctatgcctccttaccccgtcaatcaatatccggatgaggcagcctaacggggaacactgcccacatagatctttcttgtcctgatggaagcaacagaggtgctcaggccactgggctgccctaaaaacctccctcttccagggcctctgaagagccttcccctagtgcagaacactgggcggtgtccagagctccccacaacactgtcaccttcccacactcccggtggacacactgccctttgccctgctctgcgggagctgggcccccatccctgtgcctctgtctcctccagggcaggaaaggaaaccaactcccagcccatggagaacccgacgtcccaggtcaggccctggctgggactcagccagtcaccagccccacgaggggctccagcccccctgctcctacagccccacgggaggcagggcctctgggaagagctgaggggaccataaactcacctgatgccccatggtcttgggttgtgacgtggctaccacatgctcctgttggtcttggagcccctggacggtcccgccatttgggctgtgaaatcctgagaagcccccagcccatcatgaaatcagagccttcccccaagatgtggagccatcagctgcaagagctgggcagctggagaggcccccaaaccccaaggcctcccaccctcccctctggtgaccccaacatgcggcctttaccctggggaggtggggcgggaacattccctggagcctggctggaggttcccctggaggcctcctgggccagggtgcaaaaagggcaagcctgactttcaggccacgacagggtggccggaactgggtaggcgctgggcttcccggtcatctcctggtagtggggtcgggccagggaacaggggatggggagatgctgccacctgggcttggtcggcccattcgtgggcaccgatggcagcaggagcccgggcagctggagggcaggaggactctcagggaggggagagtcagctgcacagaatcagagccggagggcgtggctccaggacacagagggtggccacggggaggatgagatgccctctgctgatggggatgagaggcgtctgatttgggctttgggggtcagccgtggactcctgtgggaccctcagcagagacatcctaaagtctcccaacaagctggcgacacaaggagggtgccttggctgaaagctgtgatcacccggccagggtggccatccccaggtctggctgcaggaggtccccggggcagctgttcacttaccctgcagggagtgcctctcactggccagcagctgcaccagtgcccagaatgcatcctcctcaggaagatagaggaggaacaaggcggcgatgtggctcaggtccctgcagtagcccacctcctgcaagagccagagtcaccatggaaggacatcacctgggagggctgaggtcacctgggaggactcatgtcattggagagggcagaggtgactggagaggcttcctctgaaggagaggcttcctctgaaaaagaggcttcctcaggatgcacattcatttcatgacaagagccaagtccatcaggcacttcagcaccttgtccaaaatgtctgctgatagcaccatcctgtgtgcgatgctgccaagctcctgggctttggggcagccccaggaggagggcgtcatttcttgttctgagaagtggtggtcaggcccaggtgacaccaggagtccgggccctgactcctttgtgtctcagcttgaccccttgagaccacccccttccttggaggtttatgccagcggtgagctgacatcctacctcctatatcctggtgggtcacaaatactaactttaaaagaagcaacgacacccccaccagacacccactcctgtcaatatggaaatatggcccgggaacctcactgccgggaatactcaccgggttgtactcctcatatgccaggaggatgtggagtagttcccgctgcctaggaaacagagaaagggggctttggtttgttttgtgcagatgttgttaatttcactttgtctacaaagcctaacagcaaatcccatttcaggttcagatgtttcaccagataagcagtgagctcttcagggcctgagactcttgaagaaatgtttcagtaaaatccacatctgtgacatgcaaatagcccagttgtacagtgacttgcctgatccttttcactctgaatgatttttttttttttcagtttgcacacacgccagttcagtctgtgggtgtacagttcctccacggttccaaaccaatgtgcagagtctcccggccaccgctccagcccctcctggggcgactccttcatcctccaagtctccagggtggcccctatgcacccagcctctccccgatccgtcagcccctggccacccagactgcttctcagtccctgtggtttggccttttccagaatggcctaggaatgggaatcctactgtggtagcttattgggtctggcttctgtccctcagcaaaatgcatctaggatccacccacgttcgtgcgggcatcaccggctcgttcccttttctcactgggtcttccgtttgaagggaggaccagccttgctctccccatccccgtgttgaaggccgtctccgaaggctccgtgtgtgagtgacgaggagtcaagcagtgaacctggcatgctggtttcatgtggatgtcagtttgcaaatcagtgggttcaatatctgtgacactttggggatgtgtggttcaagtccatggagctttgtgagccactgcccaacgggctgccaacgtggctgtgccatgtcatgttcccagcggacctggatgagagtttccaggacccctaattctcccagcatttggtgctgtcactgttgcctggggggggctcatgggccctctatcctgccaccctcccatgggtcctaccatgggtccccatgggtcagggagagcacccttcaccattgtgcatgattttgtttgctgccttccatctcctcaggatcctcctgggttctggccccacatgttccagtctggcccagggcttggaaccagggaggtgctcggttcatggtgccggctgctccctgggccgggagagctcttggcagctgtgtcatccctcctgggtgaccctggcttctgctccggggaagcccccatccctctcattcaccccatctctgctgggaccctgtggctcccgtaggcttacttggttccgtatcgatccctgaagaatatatgcttccttaatgtcccgcttacgtcccggtcgatgcgctggatgtgctcagatgacctcttgcccttctccttcatgatctgtagggcagggccaagaggaggaagcagtctcagaacagatggaagactccctgcccccagtggcagtcagcccacagtcagcacttcgggaaggaaggacagaaggaaggtttccttctgcagaaagctgcattttggcttgttactgaagccagggagggtcaccagagctgagtttgtctgtggtgactgtgtcaccatctgtgcccagggtgttcatctgaccttcacccccagctccccagggtggtcttgacgttccctccagctggagacctgggccccgacacggcctgtcctgtttgttgtgctctggctgagcgtacctggtatcttccggggtttttcaacttcatttcctcaatgttcaggaggactgaccacatcgggccccggatgttcatgggcattcccttgtacgctcgatctatgagctgtgggcagaaaacaatctggtgtcacaggccacagggtgaccccagtgaggaccagagcccggggattctggaaattgtcggttttggccccatgattcctcagtagaggtgagatcaagctgggacagggtctcccttcccaggactgaaagagtggatggacactcagagtcgaaactctgatctgaaccttttccttccttcaggtcaccagggcatccctagccttgagctccgggtagtcccagccctagattcagattccctccctgcaaggtgacgcttgcacgaataggcaggaaatctggcgaccaggcctgcagtcctctgggcgaggacagtgtgccgcccaccctctgagaggctgatggtgccaggccacagccatgggtgcctgtgccctgtctctgcagagagtgcttcctccctccacacgttacctttctgctgcttttgtatttctcccagtctcccagcatatccacccacttgctctttcggctgatctcccgccgaatttgctgtcaaatgaggcatgttggagttagcggagctgccaggcttcccagagccgcccgcggatgctgggtcttgggctctggagccctggtgggagccagctggaaggagccagggaagggcagacctcaagggctgagagcctttgagcaaatgagcaccagtgggctggctttgggaccccgggatgtaccatcctcaggccacagacacaccagtcttaggtcccagcctctaggtggggtcctgacacaagcgcacagccacccccaagccaggactgtggttctccttttggaattttatcaaactgccaaagtgaacagcaacctggggtcaggtccagcagggactgctgcccctcccagtgacagcgtgttgccctcacccgccaccgctcaggccagctgcttcctctgcctcactgaccacccgcccagtccctacgtccctggaccagcccctccacgcatcaggctcttaccttcgcctcccgcgcagtcagaggaggcagctccgtctcactgtaaggcaacccaggcagagctgaggaactgcacggggcctggagcggccccagcctgggtgccgacccccagaaaggactggctctgtccctttccagctcagggctcagcccaggagaaggcacagggaagggaggacaagggccttcctgtggggctgactcccaggaggggcaggacctgggagaagaaggagtgtagggacagcctggccggggttactggggcccctggcgtggggggcggtcaggctgcccagtggggctgcccgtcctggactcgaggtggtgctttctgctggagctgagaaaggttagccctgagatgggatgggggccgcccagggtgggcgaccgggccctgacaggagtccctcagggagtgaccacatccccccgccagggtcaagggagcctgccctgagacctgcccggtgtactctggctgcaccaggggcccaccccacttgacagccccaaggcccttgcaggttctgacctcccagcatccacctgcctctccctgcacccgagccacacaccctgcgtttcagaagtggcacggctcgtcagctccctcccgccctacctccccagggatcctctgtctctccatcctgtgatccctgagggatgggctcctggctgggctcctcttacccggccccagatcccttcccagcaccagacccaggtctttagccgcgagccctgctgcctccctggcctcaccgtgagatgcccagaacggggccctgcccatcttctcccccgttctcctagggctacagcccccattgtcaccatgccttttcccctcacgggacagtgagggctgtagctctaggggaatgggggagaacaggggcaggtgggccctcagagacctgctggacaacagccctgaggctgggccaggcgtcccctcaccctgtggccataacccttgcatctcaccggggttgtctccaagtagacagggccagaccctcaggctgccccgctcctcttgtgctcacttgccgacagaactgctgagcgcccaggggcctgacctagcccagtctccattcccaccggctccctagatgggccccacacctctggcctaacaacctcgggctggacctgcaggggagtcagggaggagttctgtccctggaaaggaggttgacccgacctggtgagacatgtcctgcatcagaaaggcctttctaaaagcaaacccatccctgagctgagacaggtgctttaggggtgaggggagtgcagaggactcactgtacaatccccaaatgatcgacgttgttgttgtagcttcgaaaaggcttaggccccttgtcctctggcagcccagctcggtgtccctgtagcccagagggagccttgctgaggggtccaaggtaaagggtgcaagggcctgggggcattggccacccgtccctgccctgtgctcctagggagcccaggaccctttgaccagggcacactggaagaggcctccctccaagaagcagaccgacttgtaccttttcgtatttcataatgatgtcctctcgctcttgtgcccaccaactacccgcgacctctaccacgtccatcctgtgagacagaattgtctaaaggtcacactgtacgcggcggcttcggagaacacctgaaccgctctcgccgggctcccagatgctggctggctgcgtaacccccattccaccgccgcccccagggaaaaaggggccagacccagtggcccacagctgctccagtctctggagtctcaagtcccaagcaggggtgggcatcttcccaaggacttgagtacagtgggacctagacagagaatcctgttgtcccccaatgccatgaaatggggacacaccggccccagcaggttgaatggtttccacctgccaagggtgaagggcccatgatgggctattccagggatgtggaggcagactggggtcagcgaccagaggtctctgtgcaatcggcctcctgggatgctcagggcctcagagatgcccagtttcctacagggagcaagatctctcccgactgctcggttctactccgctcatcactttggctaccgtggctcttcagtctgaacagtgaagccactttaggaataacgcctgttgagcaggagggtgttgggtttgggggatgaggaagatctattgtacgcatggaaaccacgtctctcgcggagggactgtggagtccaccattctgagccgtcccaacaggaggaggcttcattttcctgggtcactgaggaagaacagtgggtccttggtcctggagaacagctggatggaccgtccctcctgggaatactcgaggcaaaaggagggcaaggcctcaagaggaccacgcagagcaagaaatacctggggagaaccctagtgcccggacccctttgaacacaagggaagatagtctcccctcagccagccctccagggctccttcattttccacagctgcccaagggcagcaggctcccccggacaagggaccatgtgtgttcagtggggcccacagcgaccatcaggacccagcttagggcacagaggtgttctgaggaccgtcagtggatctgtaccagtggctctataccagtggctctgccaggaccaggctctgccccatcgggatgggaaacctgggcagatttgggatctagggcagggaggtcacagggttcaggcctgaattccagcacagcacacggcagggctgagagcaaaactcagggtcatgtccggattcccaggccggttactgcctctctgaccccagacgtctcatctgtcgaatggggacatttgggaacagcacccactctacgaagccaccatggagacgaaagagccaatcgtctacacgggcagtgtagaacgggcgcctggtgagtgctcagggatgaccctcctcggtagctgccccacagaggccaacaccgcccgcaccgtagccactgtccccaagtccgcctggagggaagagagcaggtcacgctcacctgattctgatgaatcagctggcctgggtcatgcctctcagggagaaaacctttgagtccacagagctgctcacagataccactgcctgtgtgtaactgctgtagaccactgacgcaggccagagagcagataggtgctaagcaccagtgacattctgaggtcatggcacgaatcacagtggggccttgcccgggtcagcagcacccagagtcagggtcctccgctgcctgaggcgtcaacatgcctgcctgcaacgtgtttgtgcacgtgcgtgcacacgtgtatgtgggtaaacatgtctgtgcacatgtgtgttgcttctctggccaggcccggctgccccactcatgtgtgcacccagttcctcatcactgtcacccccgaggcccagggccagcatcagagcatccatggctgctccctaacctcagccctccccgcccagggtggtcgtgggatacacataggggtggagggaagtgactgctgctgttggatctcagaatacaaaagctaatactattacctaatggtctttttagtgtatctaatggtatcgctttttcatttctgatattttaactgggtatttctctccatgacccttggatattctagctagaggatcctgtggggaaagtgccgagcacacagtaggggctcactcttctagacatgttatctaaaacctggttcatctgtccttccacgcagggcctaggggatgccaaattccagggtccagaaagagcttgggataaaatgaaacttcaaggggacggctttgacctgggctgagtctgtctgtgccatccaactggagtctcaagtcctgaggcaggacgtccagatgccccagtgcagggccctcctgatcaacacctgctcccctgtactcattagcaacctcacccaccctactctcaaagcacacttggctctcgtatccaggagctctgcatctataggttcagcaacagcagatggaaaatattcagaaaataaattggatggttatgtttctattgaacatgtgcagactttgttcttgtcatcattccctaaagaatacagtatcacgaccatttatgtagcatctgcattgtattacacatcataatctagtaacggtctaacgtatacgggaggatgcgcatagcttatacgtaaatactaggccatgttctatcagagacttgagcatccatggattttggcattcccggggaccctagaactaatcctccatggataccaagggatgactgtatatactcactcaggaaggcttctcattggaggaagggcccggttcaggacagacagggacatcatccctggactactgtccatccatccattcatccattggcaccaccctctaggactgtcccaatgacagccctagcaagtggagataagaaaaaagactggctcaaatggtacagctttgaggtcttggaagatgttgcaccagtatgagaatagggggtcagtttcctccaggatccagaaagcatatcaggcaggctcggggagaggaaaggaacacggcctctccagcagccacacaggcctgcagtaggatggggctggggctggggctggggctgggactggggctggccccgtttatcacttgggcctcatgaggggaaaagaaaggacagggggcagaggaggagcatgggggcagcgggttgcctaaggagaaggcgcctcagggaaggggtattagtttgttttcacactgctataaagaaatacttgagcctaggtaatttataaaggaaagaggtttaatcgactcccagttcagggaacttacagtcatggcagaaggcgaaggggaagcaggcaccttctccacaaggcggcaggagggagtgagcggagaagcaggaagtgccacactttcaaaccatcagctctcctgagaactccctcactatcaggggagcagcaggggggaaactgtccccagatcccatcccctcccaccaggttgctcccttgacacaggaggattacaattccagatgagatttcggtggggacacagagcccaacctgtgagggtctcagtctatcttgcagctcccctggggctggggctgagtacagttctgctggccctgctctacagcacgtggggactctgcctgtgtgcccccatctgctcttcctggggatggtggctgcttcctcaagaggagggtggatctgctctcctgcccacccctctccagggccttttggagccctggccacgtcctccccaggtaagggcaggaaaccgggctccttgcccttcttgctgcttgggtgacaatcctggggtcatccataggccccatcactgttcccgcttctaaatggagggtattttggcacatcttcctggcggggtccggggcctcatccctgttatttattctatcttggtaaagccaggttaagacatctgggcaaggagatagtagagtggcccccaggaagggtgggtggagggcctggcctttgggcttgcctggagcagggtgggagggggcaaggttaccaggaagcagggctgtcagggccaaaatcaggaggcggtgataatgctggtggggggacagggctgtgtgcttggcttggggtggggcatgagagccaaggtttgtcagcacgcagaggggtggctgactcatggactaggggctatggaacccagaggctgcccttagttcctggatcctgggagacttctggagcctgggtgtggggcagcctaggggtggaggtggggcagacaggggtaggggtaggagaggaggacttgcatggcagggtgcagggtaggaaaccagccaggggccagtttgcattggcggctcccatccccatccccacccccaagcccacccctacccccaccctgctgcagagatgggcctgggctgctgtcctctgctttggcctcagcagatcacacgatggaagctggcagccccgtgggcaccactcgagccagctgtgacctgcagtttctgcttcctggagtgtggggcgcccactcaggagagcacggcacaccccacacccctcattttgaggatgctgggaggtggggaccaaggtcctgcagccctctgcttgcgctatgaaaggtagcctaggagtcctgtgtccgcccatccacgtggggccccaggagcctgaacagtggcaggcagagagatgaggagggtgagagaagtggaaaagaaggagagagaaagagagatggggagaagggagtgagatagagagagagaggatgagagataaggagagagacagaggaggctgagaggaaaaggagcgagagagacaggcagagagacacaaaaggcaaagagagagacagggagagacgagcatgagtaggaggtcggatcactctcgatcccagtccccagtgaaaaccgtaggtcgccatcacctaactacgcgtgcaataaagtcttctgcctgctgcttacagcccgagaacccttttccgagagaataaaatctttgaccgttgccctttctcgccggagtttgctcgtgtcttctgatgaactgtgatgtctcacctatcgccttcctgggctcaaggatccacgaaaagccgacgactcttttggggaggctctgcagtgccttcatctcactaggctccccaggaagcttgcgaacttggcttgagccctaagcagccgagtatgtgccgggcctctgcttctctctttcagtaagagggagaaccaagaaagagactgaagcatggtctgcagagaaggcacttgtgcaaacaccaggagaatgaggggcctgagttgtcttcatttctcctaaagacacgcatttcctcccagaccaccctagtgagggcatgaagcacagcgtgtgtgtgtgtgtgtgtgtgcgcgcgtgtatgtgtgtgttgcagggctttacagtggacaggatgtgggagggcagctgcagctccaagctgcaagtctttctgatagaatggttaagattccctggaccacagaaagagtgttttcatttgcacctatttttattagcatttaaagctgtattcttcgtagcatgtgaagcttaagttgcttaactattcttagaaacatttacaccagcggtccccaaacgttttggcaccagagagcagttttcttgaagacaactcttccacggacctgggagaaggggaagggatggtgcagagatgattcgagcccattacatttattgtgtgctttatttctatgattatttcactgtaatatataatgaaataattacacaactcaccataacatagaatcagtgggagccctgaacttgttttcctgcaactacatggtcccatcaggaggtgatgggagacagtcacaggtcatcaggcactaggttctcataaggagcatgcaatctagatccctggcatgctcagttcacagttgggttctatgagaatggaacggcaccactcatttgacaggtggcagagctcacgcggtaatgcgagggatggggagcggctgtttctacagatgaagctttgctccctggctggctgctcacctcctgctgtgcagcctggttcctaacaggtggggacccctgatttacccagtaaaagaaacacatttttatgtcaattgaaattattcaccctgcaccacccaaaattatcttgcatacctacacccatccaagggtcccgtagcacactttgggagctgtagacagtaagcctggagctccactgagcattccttctctccaccatctgtgggctaacaggctgtgttagtttcctagggctgttttacagtaccacagactgggcaccttcagcaacagaatgttactgtctcacagtactggaggccatgggtccaagatcaaggtgtcatcagggtgggtatttgttttccactggactgttgatacattcttagaaggtttttggttgctgttcacgttaatttctcttcctttctgcaattgttctctttcagtactccctgatatttttcttcttgaagaagtagctagttaattttgtattttaaaattcttcccctcaccccaagaacttctgccttcataattggttctctcctcatatttattttatacaagttatgtggctgattacattgtttctgtctgtacagatggagagttaaggaataaagaggacagacagactagattacctcaaacactgaaatgctatgatttgtccgaagtcatacacgcattatctgaccagacatatgtgctttttctctagaagcattttgtcgttttgaatcaaaaggtcttctgaatctaccttaatgaagttgacaactttcagaggttttcagtggtgaagagaaacttggacaaggagataacttccacaaacagaaaaagcctcatctcttctggattcctttaatgccagtggtcatcaccaggggcagattagccaccttttccccgggctgggacctccaccttctcctctacaggtgtatcaccttagaaatcttctgcatctcactgtcacccaacacattttctccttccaagcctctgcagtctcacgagtttgtctgtatttttcttcttataacctgccttgctaccctagccagcctggatctcataggagattaatggaaatactcccaacattgggcctttcctgtgcccgtcttcctgctgtatcctggcaaaatgccagcccaatccacagtctgttgttctacttctgtatctgaaggctaaagaaaaagcacctagtcatacagattaaccctgttttaatgtaactattccataatttcaacctcatctgagtactcagccttgcctgatgcctttgcttgcccagccctgtttagttctctcattctcttcaacatctttagcaaatcttctccttccccgtcttgaccttcctgtctcttcacctgatacagaggttcttagctcctacttcgttgacaattttaaggttttgctctcttctgtaaattgacctataggagtatccttctttacccctttcctgtggttttcaggggatggaatatttgtcctgagaaggccaatacatccatcggacacgtgtctctatccccatttgctacgtaagtatttgacttcagccatccggtacactggctctgtctctggtttacacctgctgtctctgtgtcagcactcatttccgctttagcccattgacttttccctcacaacgctactgaacttgtcaataggcacatcagtgatctcctacatgccaagtctcatggacatttttcttcatgttgtttgactgctgctctgcctgactggatattataatctcctttccttgaaaccctaggctactgtagcactacactttactggttctccgcttaccttcgttacatctcttttgttttttttttttcccggatccctccagatgtggcctaggaatccttttaaacacagtgctccaggcagaagttagttggaggtagttcacaagatgcaatttatttgccatccacccttgcatttcagctccattatttgtccttgccatgcctatctataaaaacactttctccttcccagagatggcagctaacaagacctagcaaaagaaatgggaattttcattcacaatttcatagggagagcaattggtaagattattttactgccaagggtaataaaattaatgagagagttgaagaaagaggcatgaattctgaaactgtctagaaccatctaagaggtaaagctgaggagttttatccgtatttgtaggctgtgattattttcatagaagtactctctgatttatgggtatgtcactgattaccactagaattgcagattgggcacattaagcacatcagcgtaaaaatccttgacattttggccgggcgcggtggctcacgcctgtattctcagcacttgggaatgccgaggtgggcggatcacaaggtcaggagtgtgagaccagcctgaccaacatggtgaaaccccgtctctactaaaaatacaaaagttagccgggtgtggtggcaacgtgcctgcaatcccagctactcgggaggccgaggcaggagaatcgcttgaacctgggaggtagaggttgcagtgagccaagatctcactgctgcactccagcctgggcaacagagggagactctgtctcaaaaaaaaaaaaaaatcgaaaaaatccttgacattttaaaaatacctctggcagggtttcagtgtagtcatgatatttaaaatattaccatgatttgtcagtttcttaagtataattttgtttcgtcgcacgtatgataagaacatacagacttcttgcttggggcattggctcatgcctgtaatgcctataatccccgctactcaggaggctgagtcgggaggattgcttgaggtcaggactttgagactagcctggacaatagagcaacactctgtctcttacaaaaaacataatcataaatagatttcttggtttgtggggttaactttttaaattttcctctcattaatttgccacatttttaaaaaattttttgagatggagtctcactgtgtcacccaggctggagtgcagtggcacgatctcggctcactgcaacctctgcctctcagcttcaagcgattctcctgcctcagcctcccgagtagctgggactacaggcgtgtgtcaccacgctcgactaattttttgtatttttttagtagaggtggggtttcaccgtgttagccaggatggtctcgatctcctgacctcgtgatctgcctgcctcggcctcccaaagtgctgggattacaggcgtgagccaccacgcctggtctaatttgccacttttatctgactaagataccttaactttatttattccttggattggtaatacagtgaaatgattagggcagggttttgaaaccagacagatctgggttcaaatcctggtgtgggctgtagatgttgggggcaatggccctaaatcctctgactttccagtgatttttcaatgggtaaaataacccttactttgtggaatgttgcaaagattagagaggatgtatataaaatgtttacctattacagtgcttgatatgtagaagatgaattctacaattacactgacccattttgcccattgcggctttagaatagaaaagtatactcatacactagaattgtgcacctagggctaagtgactccagccctgtggaacccttcaatgccaaaatggcatgtaggactagatagatgaatgtcacctaatcctgactgtctattaaaactcattgtgttgggccgggaatggtggctcacgtctgtaatcccagcactttgggaggccgaggtgggcggatcacgaggtcaggagatcgagaccatcctggctaacatggtgaaactccgtctctactaaaaatacaaaaaattagccgggcgtggtggcgggcgcctgtagtcccagctactagggaggctgaggcaagagaatggcgtgaacccgggaggcagagcttgcagtgagctgagaccgcgccaccacactccagcctgggtgacagagcgagactcggtcaaaaaaacacaaaaaaaaacccaaaaaaaccaaccaaacaaaaaaaaactcctcactgtattttattattattattttcaagatggagtcttgctctgtcgcccaggctggagtgcagtggggcgcaatctcggctcgctgcaacctctccctcccaggttcaagggattctcctgccttaacctcccgagtagctaggattacaggcacctgccaccacgcccagctaattttttgtagttttagtagagatggggttttgccatgctggccagcctggtctccaactcctgatctcaggtgaaccacccgcctcgacctcccagaatgctgggatggcaggcatgagctgccgggcctagccaaatctgaaatacgtttgatgccagggtagccttagtggagtgaaacgcttattaacaatgagagtatttgaaaaatatgagatatacaatcatcagaattgaatgacctttctaaggaatggttttatcctaatgaagtaatgatcagagtcgggcgaggtggctcacgcctgtaatcccagcacttggggaggctgaggtgggcggatcacttgaggtcgggagttcaaaaccagcctggccaacatagcgaaacaccgtctctactaaaaatacaaaaaagtaccgggtatggtggcgcgtgcctgtaattccagctactcgggaggctgagacaggagaattgcttgaacaccggaggcggaggttgcagtgagccgaggtcgcgccactgcactatagtctgggagcaagactccgtatcaaaataaataaataaataaataaatccgattataacatctgtgaatggaataatttgtagactcttggcatgcaagaatttgatgttagctttctcaaccgtttatgaaccgtaaagcttcatgatgtgtatgttctgttgagatggaaacttcaacgctgtgtgcggtggaggcgaggttgaggacgtcgcttggcggatgagtaagcctcacccatctggacagcagcatttacacttcaacttcacttttaacttcgtatttgctgcttgtttttatttacgtggtaactagcatgaatgattcacatacacacatatgtattctttgtctctttgtgaaatattacaccaaggagaaaacaccattatgggataattctagccttcataaccttagataatagttcacattattatttagttaatagaattgtacccacattaaatttcttaaattttcttaagagataaagtctcactctgtcacccaggctggagtgcagtggtgcaatcatggctcactgcttcctggaactcgtgggctccagcaatcctcctgcctcagcctcctgactaggtgggactataggcacacgccaccatgcctggctaatttctttgacttttctctagagaccgggtccacctaggtttcccaggctggtctcagacttctagactcaagtgaacctcaacctcccacctcgacctctcaaattgctgggattacaggtgtgagccaccacacccggcctaaatttcttatgtgccatgggactgcaaaacatcattattaggggcagctggatggaaggtgtaggaggacactatagtgccttttcaatacttctgtctaaaatctaaaatcatttcaacaggaaacatttatttcaaaacgtgaaggtggtcatcctgccatgagtttaaagtacaaaggcaggctcacggtgtcgtcagaattcagaacgatggtcgtggggctgggggtgctgggaggggccgggcatggttggctttgtgatctggggtctggtgtgttccatctctgaatctctctcgagctgcactctttcttaatacattttcataagtttaaccaaaaataaaacgaggatgcgaagcttgcttgggttgttaagcctcgggaaattatccagccatgagccgtggcccagatgcttctagaagcctggagggaactgagaactttccaagtggaggccgcagaggcaaggccctgaggtgggagcacactgctgttcgtccctagctctgaagggggtgccctggtcggaatcagtgctgggtgcactgcagggccgggaagtccatgcccacgttgtggctcagtgcagcgaaagccgatctcacccgctccgcagggtgttcagcctgccagcagggggccagctggtcctcctgggatatggcacggacccagcagctctgtctgaaatcataatggcggaaccaagggccctctacgtccaggtcggttgggaggcggggcatggagttccactgcaggaatctccaggaaccctgaggtcctccctgagccagggccgggctgggcacaccctgagtgcccacagggtaggtgtcttcccggacagccccaccaggacagggtgtggaagaacgaggtgcccgtggcggggaagctgaccaaatgggccgcgggaaccgggctggtgggcctggaggggcctgtctgtcccccttgcagagggtcttcccgccacgtgaagccggcacaggcctggatgccgacgacccttgctcgggtttggctgaaaggaaaacagacgcggtcagcatctccagtgagcccacgcaggcctttccgggctgggccccacctgcctgcgtctctggagtcctcggggtctctgtgtggcccccgtggcctgacaccgaggacacgcctgtagtctgctgatcccagagggaggggtgcatgctgcctggcgtggggaagctgtcgtggcatggcgggtggctcctgggactgcccccagggttcagactggctgggggcttcctgccacacaccttcgtcccagggctgttgggcctgggatacggcccccagtcagaactcaggtgggaggggccttggatgtcacccagccccttgtcacctcacgtggggacccgtctccgcagtgggtgattgggcccggacgtgggtcaccctctgccctcctgggctgcccagtccatgccaggactgaccgttcccacttctggctgaactcttggctctggctctgggcccggggtcccgcctgtgccctctccctgaatgctctgtgggtcagggacacggattcccttgtctccctggctccaggcttcttgtcctggcaaccttggaggagcgtgcaggagtgaggggcctctgctgctctctgcggctgtgggtgcttgcagggaggggcggggtctcccacaaatgggtctgggctcgtctagtaacttggagggccctgcgagggggagagggagacactgtggaaagtgggagggggcttgttggagggtcttgcccacatccccctcctgcgtgcacagcatgtccagtatacacgcactgagcgcctgccctgaggaccggtgggcctcctgtactttcttagagtccaggaggaagaggaggaagaaaaggtgaagaggaaggcccaggtagtagggttgcgggtcccgggcactcccctactactgactaccccagagggtgacatgggaggggacatggcactggagcccacctgggggtggcaggtccccctgctttcttgttagtttcttcatagaggccctaagatgcttgagcacagtgtcctcatccctggcccaggtatcaaggaaccggttccaaaaacttgcccacaggccacacctggacgtcttcgtgaggcgctctagggacagggtggatatcaggccaggggagttacctgggaatggtcacagctcataccccgtggccacttcagcctcctactgggcggtgccggatccttttttggccaccgcaggcgtccagatatacacaggagactgtggctggggggcgatccggacagggaagtgctcaccacactctcgactttcatctgggtcatgtgagggatgggctcggtgtcacagtgtcctgcccagcccacctggccggacctccctctgggccagaacagcggatcatgaggacagtgtgaggaagctgccctcgggccagtcggggtctgaccccagggctccccaggccccgctgggcacacgtagacttactctgctgaaccttaaaggcgattcttgttatcggcatcaacgcctgttcgccttctaccagatacacgtcccacaggcgcagggtgagcccgagagagatctgtggggacagcaggtgtgaaagaacctggtccttccaggctggggctggtggctcgagctgcgcacactggggcttcagtctccagagtcagtgaccttccccatgagggtcgcctgagccctccaggacgctgggtcagacaaggtcttgaagctcctcatggggggcactcatttgagtggggatgtggctcctggagcgaggggcttgcccagggcttgaggcttccctgagccctctcaagtcgggtcctggcccagtctgcccatgaggctgggcctgagccccagccattgccctgggatgacccctcttgggcagagggttttgcttgtgtgtcctttggggacccgcctgagcctcctgtgggctgggagtgagccagacccccgggctggggaagcagggcactgcagggcaaggaaggtccctgagccagggtctccctatgcctccttaccccgtcaatcaatatccggatgaggcagcctaacggggaacactgcccacatagatctttcttgtcctgatggaagcaacagaggtgctcaggccactgggctgccctaaaaacctccctcttctcgggtctctgaagacccttcccctagtgcagaacactgggcggtgtccagagctccccacaacactgtcaccttcccacactcccggtggacacactgccctttgccctgctttgcgggagctgggcccccatccctgtgcctctgtctcctccagggcaggaaaggaaaccaactgctagcccatggagaacccgacgtcccaggtcaggccctggctgggactcagccagtcaccagccccacgaggggctccagccccgctgctcctacagccccacgggaggcagggcctctgggaagagctgaggggaccatgaactcacctgatgccccatggtcttgggttgtgacgtggctacctcatgctcctgttggtcttggagcccctggatggtcccgccatttgggctgtgaaatcctgagaagcccccagcccatcatgaaatcagagccttcccccaagatgtggagccatcagctgcaagagctgggcagctggagaggcccccaaaccccaaggcctcccaccctcccctctggtgaccccaacatgcggcctttaccctggggaggtggggcgggaacattccctggagcctggctggaggttcccctggaggcctcctgggccagggtgcaaaaagggcaagcctgactttcaggccacgacagggtggccggaactgggtgggcgctgggcttcccggtcatctcctggtagtggggtcgggccagggaacaggggatggggagatgctgccacctgggcttggtcggcccattcgtgggcaccgatggcagcaggagcccgggcagctggagggcaggaggactctcagggaggggagagtcagctgcacagaatcagagccagagggcgtggctccaggacacagagggtggccacggggaggatgagatgccctctgctgatggggatgagaggcgtctgatttgggctttgggggtcagccgtggactcctgtgggaccctcagcagagacatcctaaagtctcccaacaagctggcgacacaaggagggtgccttggctgaaagctgtgatcacctggtcagggtggccatccccaggtctggctgcaggaggtccccggggcagctgttcacttaccctgcagggagtgcctctcactggccagcagctgcaccagtgcccagaatgcatcctcctcaggaagataaaggaggaacaaggcggcgatgtggctcaggtccctgcagtagcccacctcctgcaagagccagagtcaccatggaaggacatcacctgggagggctgaggtcacctgggaggactcatgtcattggagagagcagaggtgactggagaggcttcctctgaagaagaggcttcctctgaaaaagaggcttcctcaggatgcacattcatttcatgacaagagccaagtccatcaggcacttcagcaccttgtccaaaatgtctgctgatagcaccatcctgtgtgcgatgctgccaagctcatgggctttggggcagccccaggaggagggcgtcatttcttgttctgagaagtggtggtcaggcccaggtgacaccaggagtccgggccctgactcctttgtgtctcagcttgaccccttgagaccacccccttgcttgaaggtttatgccatcggtgagctggaatcctacctcctatatcctggtgggtcacaaatactaactttaaaagaagcaacgacacccccaccagacacccactcctgtcaatatggaaatatggcccgggaacctcactgccgggaatactcaccaggttattctccgaatatgccaggaggatgtagaatagttcccgctgcctaggaaacagagaaagggggctttggtttgttttgtgcagatgttgttaatttcactttgtctacaaatcctaacagcaaatcccatttcaggttcagatgattcaccagataagcagtgagctcttcagggcctgagactgttgaagaaaagtttcagtaaaatccacatctgtgacatgcaaatagtcctgttgtacagtgacttgcctgatccttttcactctgaatgattttttttttttcagtttgcacacacgccagttcagtctgtgggtgtacagttcctccacggttccaaaccaatgtgcagagtctcccggccaccgctccagcccctcctggggcgactccttcatcctccaagtctccagggtggcccctatgcacccagcctctccccgatccgtcagcccctggccacccagactgcttctcagtccctgtggtttggccttttccagaatggcctaggaatgggaatcctacggtggtagcttattgggtctggcttctgtccctcagcaaaatgcatctaggatccacccacattcgtgcgggcatcactggctcgttcccttttctcactgggtcttctgtttgaagggaggaccagccttgctctccccatccccgtgttgaaggccgtccccgaaggctccgtgtgtgagtgacgaggaatcaagcagtgaacctggcatgcaggtttcatgtggatgtcagtttccaaatcagtgggttcaatatctgtgacactttggggatgtgtggttcaagtccattgagctttgtgagccactcccaactggctgccaacgtggctgtgccatgtcatgttcccagcagacctggatgagagtttccaggacccctaattctcccagcatttggtgctgtcattattgcctgggggagctcatgggccctctatcctgccaccctcccgtgggtcctaccatgggtccccatgggtcagggagagcacccttcaccattgtgcatgattttgtttgctgccttccatctcctcaggatcctcctgggttctggccccacatgttccagtctggcccagggcttggaaccagggaggtgctcggttcatggtgccggctgctccctgggtcgggacagttcttggcacctgtgtcatccctcctgggtgaccctggcttctactccagggaagcccccatccctctcattcaccccatctctgctgggaccctgtggctcccgtaggcttacttggttccgtatcgatccctgaagaatatatgcttccttaatgtcccgcttacgtccaggtcgatgtggtggatgtgttcagatgacctcttgcccttctccttcatgatctgtagggcagggccaagaggaggaagcagcctcagaacagatggaaggctccctgcccccagtggcagtcagcccacagtcagcactttgggaaggaaggacagaaggaaggtttctttgtgcagaaagctgctttttggcttgttactgaagccggggagggtcaccagagcccagtttgtctgtggtgactgtgtcaccatctgtgcccagggtgttcatctgacctttgcccccaccccctccagggtgtgcttgacgttccctccagctggagacctgggcccctgacacggcctgtcctgtttgttatgctctggctgagcgtaccttgtattttctggggtttttcgacttgatttcctgaatgttcaggaggactgaccacaccaggccccggatgttcatgggaatgcccttgtacactagatctatcagctgtgtgcaaaaaacaatctggtatcacaggccaccgggtgaccccagtgaagaccagagcccaaggattctggaaattgtcggttttggccccatgattcctcggtagaggtgagatcaagctgggacagggcctctcttcccaggactgagagtggatggacactcagagtcaaaactctgatctgaaccttttccttccttcaggtcaccagggcatccctagccttgagctccgggtagtcccagccctagattcagattccctcccagcaaggtgacgcttgcacgaataggcaggaaatctggcgaccaggcctgcagtcctctgggcgaggacagtgtgccacccaccctctgagaggctgacggtgccaggccacagccatgggtgcctgtcccctgtctctgcagagagtgcttccaggggcctctccctccacacattactttggtactgttcttatatgtctcccattctcccagcatttccatccacttgctcgttcgtctcatctcccaccacatttgctgtcaaatgaggtatgttggagttagtggagctgccaggctttccagagccacccgtggatgctgggtcttgggctctggacccctggtgggagccagctggaaggagccagggaagggcagacctcaatggctgagagcctttgagcaaatgagcaccagtgggctggctttgggacctggggacatgccatcctcaggccacaaacacaccagtcttaggtcccagcctctaggtggggtcctgacacaagcgggcagccactcccaagccaggactgtggttctcactttggaattttatcaaactgccaaagtcacagcaacctggggtcaggtccagcagggactgctgcccctcccagtgacagcgtgttgccctcacccaccaccgcccaggccagctgcctcctctgcctcaccgaccacctgcccagtccctacatccctggaccagcccctccatgcatcaggttcttaccttcacctcccacgcagtcagaggaggcagctccgtctcactgtaagacaacccaggcaaagctgaggacctgcacagggcctggagccatcccagactgggagccaatccccagaaaggactggctctgtccctatccagctcagggctcaacccaggagaaggcacagggaagggaggacaagggccttcctgtggggctgactcccagaaggggcaggacctgggagaagaaggagtgtagggacagcctggctggggttactggggcccctggcgtggggggcggtcaggctgcccagtggggctgcccgtcctggactcgaggtggtgctttctgctggagctgagaaaggttagccctgaggtgggatgggggccgcccagggtgggcgaccgggccctgacaggagtccctcagggagtgaccacatcaccctgccagggtcaagggagcctgccctgagacctgcccggtgtactctgggtgccccaggggcccatcccccatgacagccccaaggcccttgcaagttctgacctcccagcatccacctgcctctccctgcaccagagccacacaccctgcatttcagaagtggcacggctcatcagctccctcccaccctacctccccagggatcctctgtctctccatcctatgatccctgagggatcatcgatccggtctctactaaaaatacaaaacttagcagggcatagtggcacgcacctgtaatcccagctgctcaggaggttgaggcaggaggatcacttggactcgggaggaggaggttgcagtgagctgagattgtaccactgcactccagcctgggcaacagactgagattccatctaaaaaaaaaaaaaaaaagttttctgggcaccacattccaagtttatgtagttttcaaggaaaatagaatactgggcccttcgtagtccaggccttagctttgagtctataaaaaaaagtgcgttagccaagcactgtggctccctgttgtaagaagtcccagctactctggaggctgtggtgggaggattacttgagcccaggggtttgagtccagcctggacaatataataagatcatgtctttttaaaaaaaggtttatttatttttttagttattaaaaagtagagatggggtcttgctatattgcccacgctggtctggaactctgccttcaagtgatcttcttgccttggcctctaaaattgctgggattacaggtgcgagctattgcacccagccaaaaagctggtgcaataaaaattccatctacactctacctttttttccaatactatagcataataactatattttcctttgtttggtgaggcaatctccgtgtcctctggtgtgtggtctctgctattactaagagagtcaataatctttacttagttgaagtacaggtctgtctcttatggtcttaggccaattggcccaggacagtcctcaccacaaccctgaaggaggggctgtcttgaccccctttttctagctggggacactgaggctgaggaaggtgaagggattcgttcctgtgttgtacttgacatgtgagctcaggacagtgttggtttctccaaagcccaccgcaatcctctgcctggtcctcttctgcccagtgcccctggccttaagccatggtggatttctgtttagggcatgcgtcagacccttccttgagctacagacatcggagtacagggccccggctcccttgtttctgctccacatacagaatgggtccagtagcactgaacccaaatctggcattatctggtctacaaataccctccctctcactgccctgccaccccaggtcttggaggtaccagaataccctatcatgtactgggaatcccatgtgactggactcatgatgtagaccacacaaacccaaccaaagacccctttccggccatgctgggtccctgcccacaaggggcaggtttctgacttgaggttgagggtaatcacccagggtcggcacaggacatgaggaaggagatggagcctggtgcccccacctcagaccccaagcctcagctccctccctataaaatggcctcccagtggattaaaaagtacacatataaagcacttggtgccaagcatagcagatgctcagggcacctcagaagttaactgggttacttatgaaagagggtttgctggagcagcctgcttgccgctcaccagcatccctctcatatctgttcccatggaggtagggacaatgctgaggactggctgggcgaggacagaggctcccggggtggtgtgggcgtctggtggcagcaacagggctgctgcaggagcatgtagtgtgtgtcaagtggtagtggcacagctgctcagagggaactgcctgcccggcacttcactctcatgccctggcacttcactttcatcatgaactcattcgtgcctgtgcgctggatctgccatcatccacatatgagttgagctcccttcctttgccagccctgggtgaggcaccaggggtaggagggtgggacagggaaatgaccagggcatctcccaggctttctggagctctcagacctcccgcttctgtttgggctggctgcctcgtgttcctgctatgaattgtcatgcatgagtgtttctgccccttcatttatggggtccccaggcactccactcccaccccatgacatcccatttttctgagtctcacagcttctgcattttagttcacttctttacgtttgtgaggtacattctctggaagtttcctggcagaggtacatggaaggtaaagttttcagaccctgaacatctaatgatatcttttttctactcttacatttgatcaatattttgactagatatgtacttccatatggagatagttttccctccaacatttgaagtttacttctgtattcttccggtgttgctgtgacaatatctagtccctagggggtggacttcttttcccccagaagttttaggatcttttgtttatcctgtaggcatttttcaaaattgccagtgctgtgctttctatggtatttttttcacgcattatgtggatatgtggtatcagttccttcagctggtaaacatatgctcttccattctggggatttacaaaaattcgttataataatttcctccctattgttttctcttcctagaatttctactaatacgaagttaatcaactaactcttttcgtctccttccttccttccttttcttttactccaattctccttcccctacctccagctaacttcctgggagattttttcaactttatcctccaatcctactgaatttttattaaacagcttaaattatttaaaacatttttcttaagagatggggtctcacttgttgcccaggctggtctcaagagatcctcctacctcagccttcagaagctctgggattataagtgtgagccaccgcacctggctaaacagtttaaattctaaaagctctttctttttcttagactagttctttctttccatcaaattgattttgtttctgtttttgtctttttgagacagtcttgctctgtcgcccaggccggagtgcagtggcacaaacttggctcactgcaacctctacctcctgggttcaagtgattcttgtgcctcagcctcccgagtagctgggattacaggactgccaccatgcctggctaatttttgtatttttggtagagatggggtttcaccatgttggccaagctggtctcgaactcttagcctcaagtgatccttctgcctcggcctcccaaagtgctgggattacaggtatgagccaccacatctggcctcaaaaaggctaacaatctttgactatctcttcctgtctggggatgaggcattaaaaagctgctcagaagttccagcagaaggggctactcctaagagacacaggaccagaaaatacagactcaaaagtaggccttggtgcgctggggctgcccctcatcctccactgggcctttgcatctgttctaggctcacagagagagcagaatgggaaacggggaccattccaggtggtgtatggagggttgcatttgctctgtgcactgcccagtgtgatgttcctcagccttactgtaggtcatccaggtggtagaattattctggtttatacagatgctgaattattctatttggcgggagccttgccaccctgggcttcagggagaccctctcccagggccccctgggtttttcccattctagcaggcttgctgaatgcgtttggattcacattcttccccaacaactgctgtcacagctctggattggctaccgcaatgagaaggtaaagcaacactttgtgtctcacgacctgagggcccagcaggtgtggccggcagccaaatcccgacatctgcacttcctccaggctcctgcccctccccacggtgtgcccagcagtctcctttcctcagtggatgctgttcatgtccttgccatggctgccaagccagccaagaggtaacatgttggtcctcgggccacagaagccctcttctgtccctccaggaggattactttgttaagagcctggagtggctgtttgttaactaccatagtaaccatagcagtctggctctgaacaagggaaccccattagcatcagctccttgatggatgaggtggagagcaggggacagggaagaggatgttgctgagaagtttgaagaagttagtcattaggagtcttggtgactgtcccgtgccctctctgcccttctgtctcccctaatgtgttcactaatacccaccttttctgtctcttggggtcactctaatgtccatggtgacacttgttattatctattgccaggggacccacaatgtgaggaccatgagggaggggagttagatcttcctgccccatggttgacagtccacctcaaccatggggcagagcagcccctcaaggggctgagcagcaccatctgtctcagacatcatccagggtgtaccagcaggcaccctagagaaggaagggggccagctacaagagtcaaaagcaacatgattcagtatgcagcacaatcattttaagaatcctgattctgggctgggcgaggtggctcacgcctgtaatcccagcactttgggaggctgaggcaggtggatcacttgatgtcaggagttgcagaccagcttggccaacatggcgaaaccccatgtctatctaaaaacacaaaaattagctgggcatggtggtgggcacctgtaatcccagctacttgggaggctgaggtaggagaatcacttgaatccgtgggatggaggttgcagtgagccaagatcatgccactgcactccagcctgggtgacagagtgagactccatctcaaaaaaggaaagaaagaaaggaaggaaggaaggaaggaaggaaggaaggaaggaaggaaggaaggaaggaagaaagaaagaaagaaagagaaagaaagaaagagaaagaaaagaaaagaaagaaagaaagaaagaaagaaagaaagaaagaaagaaagaaagaaaagaaaagaatcctgttctgggacagctcaacagccctgaggccaccacctgctctttgccatagtgtgaactcatccctgacacagagcccagtcccctggggccctgctcacggggtctagccagaatgctctccacagctcgaaatggaacggcctagcagttggagatgccagacgtgagttattgaacacatctgccgagaccagagaccaggacacgacatttgtatctaccaaatgagtgctggcagctagctctgctcccctggaacatcctctcaaaacccttttgccttgactattatctcatctctctcctggcctgcactgatccttggccgactctaagaagtcacccgtgggggcctggggcaagacaggtcatggttctgggcaccagcactgccatctggctgcttcttctggcctctctttgctggactagtgcctggcccaatatcatgccatcatgatcacgctcaactcgagggatatcatttactccttcaagggcaagattctagacccctcactgcagagcccttcactggggacacccggtcttctttgcctgcttggacattgagggtggagggaggaaggggttgtgggcatccatagaagctgtggggggcatccagaaataagggagagaggcatcttcactgctggcggtgtgcgggaccaattccagggattgtctgactgcgctcccccccaccaccccataggtagcagggtctgctgggcttggatgccagtgggaagaatgcgttcttcgagagtgagtggaccctcctctgggctcactggaggggacgggtctggagcaggcagagtgagccgctgcttgcgggatccgggatggagctcaggaatggagctccacactctcccagctgcctggcccgggacaagcattggccctttctgggcctcctcaggaatctccaacctccgaggcgattctagtttaagcctgatgaggcagacgtgcatccgggcggatgattagccggtgtgggcgcggcctggagcgggcccaggctggggagtggcggctgcacgcggtgacgactgtgtgttcgctgagtcagggcccggagcgcttcagcaccgcggcttggacagcgccccggggcaagcgggtggcgctctccctacagggacaaatgaccccagggccggcatttctgacctagagaacgggcctggattgctctggcgggttctgagcctggggttgggggcgggtggggagcggacgaagtgggggcggcctttggagacgatggcaatttaccgccttaggcgggcaagcgcacgagtcccgggaaccctaaacaggttggggtgccccttggggtctagatgaggcccgggcttgcgataaagcgtggcggcgtctagacataacgtcccatctcctgaacccgtcaaggccggtggcacccaacctggcgggctcatctaggaccagtccacacccaaggccccaagacccaaaacctcctgggctgggtctgcctggctaggggcccctcatcctgggctctactcttttggcgcagaggccatgtggcaggcccctggtctgcgccctgctcagcttcccctccccaccccgaaaagtggagagccccacggcttccccagaaaagcagtctgctccccgcgccccagcgcagctcgtttactatgggtcaggagaggaatcccgccttttttccgcagcgaggatggcctgggctcctgcgcgaagcgaggctccgtcctggagaggctcagtgacccggcagtggcgccgatccgggttagccagggccgcgctgggacccgcggagtcgcgtgatgcaaacgggaaggcgggagcaacccagctccttcccggtgctgcctggctgctgcataagccgccctttcttccctgacaaacactgtccagatgggcaacaggtccgtgtctcctttggcagccactgtctccagaaaggcattgggcagttaaggtggtcagagccctcaggtaaatcctccctctccaggagtcagcccttccagctgcgggagggcaggtagtgggatgcgggaccttcgcagggctgggagatgtcatcaacttttaccctcacatggggagagtgggagtgctgggcctggcggtcctcttacgtccttactgtgcagcttgggattctaggttggaaggagtcaccctactgctcagtcagctctatttgccacctgcccaagaagacccatgggaatggaggctacaagacactctagggcacagtgacaaggagggattgattccaagactccttggaagaaccagatccctgagcttctcaacaaaacaaggggccacctctggtctttgccctccaaaggggaaggcaggaaaattgttagaggcagattggcaggaggggcctgtggagtgtgcagggggccagagccagttcctagaagttgagcaaggggatatgggcaccaatgcacacaactgtgcactgggggcctctgtctcctatcccctggtcccaaggatgtcatgatggtttgacctgtcttctaggacattctctaactagggcagcagccatgcctgttgacctggtgaaacaactccagccctggtaccctgtgacatgacccaggaggtggtgaccatatgtggtaagtgagttgggaagcagagtggaggatgaagaggaccaccacaggcgccaaaacagcagtctcagtgcaggggaccgggctctgggaagcaaggggctgtggtcctcagtgatgcttctcggctcccagctagagctgcaggaagttgtggacaaattcagccaaggactctgaaactcaggtgaaataaataaagagagagagagagaaagagagagagagagagagagaggaagggaggaagacagagagaggcagaggcagagacagaaagaaagaatttcaaaagatgcaggcgaatcagccctccttctgccccctgagcctgtgtcctggactgagtctgagatgggaggtgagacgctgctgggcctcccaccaatcttagtttctgtaggtatttctccaaagtatgggttggttgagggttggtttaaaacatgtttctggctgggcatggtggctcaggcctgtaatcccagcattctgggaggctgaggcaggcagatcacttgagcccaggagttgaagaccagcttgggcaacaaggtgaaatcccgtctctacaaaaaatataaaaaattagccaggcgtggtggtgcatgcctgcagtcccagctactcagaaggctgaggtgggaggatggcttgagcccagagggtggaggctgcagtgagcctagtctgggtgacagagtgagactctgtttcaaaaaaacaacaaaacaaaaaaaccgcaatgtagtttctgactttcatgctgactgtagaacttaacttttatgaagaaacataatatatttcagaactttatagcaactctggtggcactgcagagtcaggtcattcttcctggacttctgtccacttccattatgggatgtctccactgagcgttgcctacatcatctctgaatttgaggcctaaagtgtgaccagatttaatcaaatcctgcttggaaaatataggcccattcaatggtgatccattctggctaaagactttttttttttttttttttttttttttgagacggagtctcgctctgtcgcccaggctggagtgcagtggcacaatcatggctcactgcacgtgatcctcctctgcctcccagtgtcaaattatcctcccacctcagcctcccaagtagttgggactgcaggtacacaccaccacactcagctaatttttatatattttttgtaaagacggggttttgccatgttgcccaggctggtctctaactcctgggcccaagtgatcctcctgctttggcctcccaaacttctaggattacagtcatgagccactgcacctagactagaatctctttgactgtttaaatgaattacaagataattggcatttttagtacataggactaacattccatcatttatgtactctttaaagtttttcaaattgttgtataatttcccccacaaagttttcggatagcaatcttacagattcccctgagaatgttggaagacaatggtgggactacccaggcaaagccagaataaaataaggtttacaattctggctgagaaaggaagtaggattaggcatgtagttaaaagggaaccaaattttggtatttaataaataaaaatttgccgaatgatgtgatctttgattatgtctatcttaactattcgaaaaaccaaagcaaccatttgacagtagatcaatgtcaagttttctttccacaaggaatttgacacctggactattccgtgtgtctgaaacattatctacacagataaaggtgaaggcctgaattgcccatgttagcctgtctacactcctggaaatcaatcttccttgcttagggctttagcaagactctccccaccctagcctgagtctcctgggaaaaagaggaattcaggcaggaggacacaagcggtgacttagcatgcagcaaaaagaggtgcaagggcaaagaaaaaaggcagtggggaagcagtgccaggcctggcatgggtgaagtagaggtgccttgcagaaagagaggctggagccacactgtgaagggcctttaccgccatgctgagccatgggtgacacaatcagagccatgtttaaaaaatatatatctacaacatcatgtgaagttggaggttgactagagagggcaatacccaggttaggaacctctacgtgaggtgctagtgaaccctggagaaattcaccagaggagtgaacttgtcagatccacatgttcagaaacatcaccgctggcagcaatagggtggcaaaaatgactttctcaatgccctaagggatcctggtggagcttcgcagggctgcagtgaatgagggatccagggaggtgtttgggactccatatcctatccctgattacagaagagtgctttcttctgtttaaagatttatctagagatattaattttaaaaagattgaaaactactgctgcaaaaacaaagattggggccaggtgtgggggctcacgcttttgtaattccagcactttgagaagctgaggcaggaggatcgtttgagcccaggaattcaagtccagcctcggcagcaaagcaagaccccatctgtacaaaaaaaatttttaagtagccagatgggtgtcacacacctgtagtcccagttacctggcaggcaaaggcaggagcattgcttgacccaggagttccaggctgcaatgaactacgttcatgccactgcaccccaccctgggcaacagagcaaggctctgtctctaaatacaaaacaaaacaaaacaaattaaaaaaaaaaagagagagattggagtggataagaccaaaggcaaaaaaaatccaaggagaatgagcaaaatacaataggttgaggacctagaaagggtctctgagaacagagaagggtcagattgaagaaagacaggcttgaaaaaacttgggaagcaatcagatgtgagaagtgaaggaaaggggtctaaccagggagttggtgaggacagctaccaataactgaaaacttactaacagccaggcacttattcatagtgtctcgtttaattcttgcaaaaaagcctgtgacagtggtattatttccacttactgatgaggaaacaaaggcttcagggaataaagaaactggtcgaagctccacagctagaaagtgtcagagacagactgtgaacccaggtctaactctaaggctgtgttacacactaggaagtagggaggatgaggagaatagagaggagagcgaaccccaaatgtggacagatggttctagcgaagcagggtatttccctgaccgcttcgcgggatttgcaacaggagtgcctcatttactcagccggcagctctcaacatcccgtgggagggaatgcatgagtgaatgaggcaggaactggagtgcacaagtgctggaaccagctggccacttcggtgctggcaggagcgatcttcactcacttggaccaccccttgcaggagggagcacacaggtgagtgggtgcaggatctggggagagtgcttttgggcgccggcaggagcaaactctgtgtgggctccacagcagcatctaggcaggagggttcctgtggcccctgaagccccagagggcgtgttacggtgttcttttagctcttctgtccatggatggcttaagcattaacagctcagtggaccctctgccttttcacatgaggcggctgccttccaccagcgagggcaaagggccagtgtgacagccttttgtatctgcactcgtagctcccaggctctagtccagcatccaggaaaaatgaagttgcatgaatgaattgaaggatggtaaatgcggggattttacggctgattaaagtggccctcagtggctctcagtgggaatgggagctgaaaaggggtcaggggggtgtaagtgatcctcccctgaagtccggccatctccagctgattcttctccaaagttacgctgtcagaccgtccctctgaagtcaagccatttctctctgacattcagccagagtgcctgatgtccagctccttctttctgatggctgagtctggggtctttatagggacaggatggggtggagcagggccatgtgtagtttaggaaaaggcaacatttgagcaggaaaacatcgatagaagttctcactttgggtctcaggctttttggcttgagtcgggggggcttcaccggggacccccccgccaaccccgtgtctgcctagaatttctcggcctcctgtagctatcatttcccccctctgaagatgcacatctaactgctgttaggatacagacaatgaccgatctaagctgcttcctgcagagagggggcattgttttggggagaagagcagtcagattcttcccagaggtctacctaagggtccccagcaaaagggagccatcatccagggctctgcttgccttgaccatttggagtttgatggtctctaggtgagaagaaacaagttctacaaggttaagtatgcatgaatcaaatatgtgtattatacaaaaaggggttaaaaggaaagaatctagtggcaaagtttacagaaataagaagtaaaatatacaaattattctgaaaacaacattatatcctgtggtatagaacagagcaaaggtaagaacagcaagcatagccaagacttttaaggaagatatccatggaaggttaattattaacacttatcttttgtgattcttagcttgaggtccctgatctcttcacattggtactttgagtgctcttctgggttaatggaggtaactccattagcttcctaggcccttactagggtataatgaatccaagaatctattccagtgaccttcactgccataggagtagaaagaagtacagtgtaaggtccctcccaatctgggcttatagagggacaaagggaaggaagtacctttaccagtactaggtccccagggttgaatagaggtggtcctggttcatgggattgtgcctctctgacagttgtttcagttcctgttggaaatgggccaaagaagtgatatgtttaaccaaatcaaaggtttcttggtctagcaagaaatcattggtgagaaaaggccatccatacatcatttcaaagggattcaaacctagccttgaaggggtgtttctaatacatagtagagatatgggcagaagggtagtccaggggaggtgagtctcctgaggtgtcttttgataatatcatttgtcttttctacctttcctaagaattgtggtctccaagcacaatgaagaaccatcttcattgtactgtatgcctagtgcctttgagatcccctgggtgacagccgcattgaacaaggggccattatcactctggaggtacttagggagtccaaagcgaggaattatctcattaattagtaaaccttacatcctctgttagccagaaaattaagaagagccttactgccctcctgagagatttttttagttagagtgcagaggagaatgtcatctacatattgtaaaactttcacctgaggataaaggaacttggagaagtctcttgaccgtgcctgcccaaaaaagtgggggctgtttcagaatgcctgaagtaacactatccagattaactgggtggtctggttagagggatcctcaaatgcaaacaaatactgggggtttatataacagtatgcagaagaagcataccattatatctttaggtccaggactgtgaaccttttagttccctcaggtatgtgagctagcaaggtatacagattgggagccactgggtgaattggaaccacagcctcattaacaagatgaaggtcctgaactagtctccattcccctttgggtttttgtacccccaatattggggtattacaagggctgttgcagagtttgaggaggtactgcaaccttaagttatcaatgatggcttctggtcttttcttaacttctggtttcaggggctattgtgtctggttcagactggtatggtggttgtggctctgccaattttcccttgagttacccaaacttctgggttaaaatcagtctccactaaggggagacaaagagtttgtcctggggccatcaggatggtggttcctacacgggccacaatacccctacccaacagagtatttggcctttcaggcacaattagaaaggcacaggtgaacaagaggtctccccaactacaactaaggggttggaaaaaatattgggtttaaggccttcctgggatgcccctcacagtcatgctaagagaggacagggggcttgaattggagatgaaaaccgagagaccagccccagcgtccagaaggaggtccactttcctcccttccatatccagaattgtaaattctggggctcctggatggtaatggtggtctggaccaccggagccagggagaggagccccaggacttgtcagtcttgctggaccatttgggagattggctctgggcctggcgaccagtgcccccggggacagtccactttctagtggtccccattgtacattggacagggttggggtggcttcctcatgttgcctgggcaatccttcctaaaatgccctggcttaccacatctgtagcagttaacaggtgtagcttggggattctggagtttgtgggtttgcatggtggccattaaagcctctgcctcttgcctgtgtctcctctctctctcttctgggcctccctatcttattacaaaagactgaggtggccactttcaggagattctctaaggtactatctggtcccagggcctgtttctgcagctttctcctgatatcaggggctgcctgagtaataaatttatcctttaggattacttgtcccttgatggaatcaggagctagtgaggtgtgctttaccaagactctattagcctctccaggaaggcagtaggatgctcattgaatccctggtccatcctggatagcttggtatagttgagaggcttagttctagtcctacataagccctctattatgcccacctgaaactgtctcctcttacattctcccgtcttgtcattgggatcccatttagggtcattcattggtactgcttctcctccagttggataaagtttgaccccctccctgacactatatgtgacacaaacctcatccccagatctctctgtcacttgcagagcagactgcttctcagtgttagtcaggtttgattcaaaagtaacataatgtctttccaggagagttcaaatacttgggttaaattctggaaagcctttatatatctgtcagggtcatctgaaaacttgccaagatcccccttaatttgctttaagtcctgtagagagaagggggacctggaccagggggccaaattcaccaagcatctgatggagggcaggaatgagactggggcttgtctagggtgaggagttctaggaggggccaagtgagagaaaaactgggtaggcaggatggggtggacccagaggagcagggccagtgggagctggctcccttgctggaggtgcctctggagttcatttctttagttctctggtattgttctctgagatggcaaacaagaggtctggagcaatcctacactgtcagcaaaggtctggattgccctgcaaggtaaagaaggcctgcacatatggagcctcagaccatttgccctcacatttacagaaaaggtccacctgcaggatggttatcgaaattaatggttccttcctgaggccacgccagtccttcctacagatcataatttggccaaacctttgtgcaaagggctatgaggtgttttccctctagagtctgagggttaaagcagtcccagtgattcaggatacactccagaggcgtatagactgaggatggtgaaagtagttggtgcccattctgaaagagagggaaataggcatcgctcattttctttccctctttccccaagagaaaacaggtgtcctccttttctcttctatatgtttatccccgagttctggcaaccttagatggacaccatccataggtgccattgtggcctgtacccgtgaagcagggagggcctagagaataggaattatctgcactcacttacgcctccatgccccctactgtcggcaacctttgggttccttgggccttatctatgccatggagtgtggcctccttccatgaagcaggggcttaattggcaggaattagtcctgcccattgatactgtgcctgttgcttggctttgaatccctcagatctgattttcctttctagggcttcaacctgaagtttagaattgagtttgggattgggccaggcacagtggctcacgcctgtaatcccaacactttgggaggccgaggagagcagatcaagaggtcaggagttcgataccagcctggccaacatagtgaaaccccatctctactaaaactacaaaaattagctgggcgtggtggcgggcgcctgtagtcgtagctactccggaggctgaggcaggagaattgcttgaactaggaggcagaagttgcaatgagccaagattgtgccactgctctccaggctgggaaacagagcaagactccatctcaagaaaaaaaaaaaatgagtttgggatgaaaaggtgtctcgggggtgcatggattcatttagattaagtcccaggcaggccttgccaaatttgcagttattagccagtgggctcgctcctccactgcttttctatcataagcagagtgctgaggtaggaaaagaacctcctcgcatagaaaaggaaagagggaaaaaacaaaacagcttaagagggggaagaacctcttgctctctgtaaatgggttcctttaatcactatatccttcctctggtttggacggagctggacccctcggctgtctgggggaggaaagactctgtgggcatgtggaaggaggggatggtgagtgggaaatgctggccaactggctgcattgggcccctggcccccaagactgccctggggcctgggcagcagccacagttctctcccaccctgcccttgggcacttcatgtgcatgctgtggacacgcccaggtgccgtagctgggagggaagggtgaggaggggaacagccacgtgctgcacacctttgtggctgttggggttgggcgtgggggtcgcacctctaagaacaaatggaagtcacattgttctgaattgcatatctggtggctgagccaaatgctcattctacctagtaacatttctgcagtttgcagcaaaacccttatcattataaagggagagagaggagccatttttaaccatgaaagaagaaagggaaagataccatagaaaggtccaggggtgttggtcaacgccttaagtgctatcggggatgggatccagtttaggggccttctggcaacaccaaggagtggcctcctccagatgccttcagttgccccaggactttattctggtcccacccgatggctagacctctttgaagggaaacagagccaacattcctttcacctgaaacaaagagataggtggcaggattgcatcctgtcctctgcaaatggcatagctcagaggaaagtctgaggacaagaagtcttaggaaaaaagtgaagagacagatatggcagatctgcatttatttgcccttctgagaaatcctggataggccctgtggaagcaggctatttccctgaccccttcaagggacttgcaacaagggtgcctcatttactcagcctgcagctctcaactcctcacaggagggagtgtgggagtgaatgagacaggaactggagtgcatgagtgctggaaccagctggccaccttggcactggcagcagcaaactccactcactcagactggctgtattgcaccactcacaggagggagcgtgcaggtgagcaggtgcaggagccagcatgagcacttttaggcactggcagtagcgaatgctgtgcaggtcccaggcagcatctagggtgggggtgcctgtgacccctgaagccccagagggcgtgttacattgctcacttagctctgccatccgcagacagcttaagtgttaacagctcagtgggccctctgccttttcatgtgggatggctgccttccactagtgagggcaaagggccagtgtgacagccttttgtatccacacttgtggcccccaagctcttgtccagcatccagaaaaaatgaggtcacacaaatgaattgaaggatggtgaatgtggaggattttattgctgatgaaagtggctctcagagggaagggaggttgaaaaggggccagggaatgtaggtaatcttcccctgaggtccagcagtctctggccagattcttctttgaagttacactgtcaagctgtccctctgaagtcaagctggttctctctgactttggccatagtccccaacatgcagctgcttctcctctctaccggctgagtctggggtctttataggcacaggatggggcagggcaggaccatggtagtttaggaaaaggcaacattcaagcaggaaaatggggatataagttctcactttgggctgtggtctcaggctttttggcttgagggtggggcttcaccagggatccacccctctctgcctagaatttctctgcctcttgtcactatcactaggactagagctatggatctgagaggcggaataaaaagataaaagccatgcagccttggataatcattaagttaaaaaggaatttgcttaggggaccaagggaaggggacactacagactgtccatcccctccacccctaccctaggtgtcatgcccttaacttttcacagctacactcaactttagtcagattttttttcgtctgtttgtttggtaattgtctttatttgccatgttcaactgtaatctgcaaaagaataaaaacaattgtctttggctggtaagtgagtagttaaaaactttgatttgaaggtgtcatcagatatcacctttgtttctgtctcaaggcaggaaagttttgcttccattcaatgcaaacatagctgcctggatctggctagtgttaactcatcagatgctttgtgtgagggacccctaagttctttatttcaggcagtgaaagggccaagggggtatcattgttgggctgtgtttaaggcatcggttgacctttatccagctttgaagtcatgatatagaacagttccagcatcctgaaaaatttcctcataccacttggccatcaacccccaccctgcccccaccccagcctctgtcaccatagttttgcctttgctacacctttttttttgtttgtttgagacagagtcttgctctgtcaccaggctggagtgcagtggcacgatcttggctcactgcaacctccgtctcctgagttcaagtgattctcctgcctcagcctcctgagcagctgggactacaggtgcacaccaccacgctcagctaattttcgtatttttagtagagacggggtttcaccatgttgaccaggatgatctcgatctcttgatctcgtgatctgcccaccttggcctcccaaagtgctgggattacaggcgtgagccaccgtgcctggctgctacaccttcatataagtattagacagtatgtagtcttttgtatctagcttctctcacttaacataatgatttggattaatccacgattttgcttttatcagtgatttgtttctttaggttgctaagaggtatttcattctataaatctgccataaattgtttatccacttatcagttgatggacaaatgggttgtttctaattttttgcttttaggaataaagctgatataaccttttgcagagaagactttgtgtgaacatacatttccattcctcttagctaaaaatctaggactgtgtttgctgggttggatgataagtacatgtttaacttcattaaaaaaaaatggccaagctattttccaaagtgattgaatcattttgcatttccagcagcaatatatgagatatccagttgctctgcctctttgtcagcacttggtattgtcagtttttttaattttcgtcattctagtagatgtgtggtggtgctgtattgtgagtttaacttgcatttccctaatggctgtttatgctgagtatctactgatgtgtttatttgccatctgtatatattctttggtggtaaaagacaaaagttatttatctaagatgtcttttgcaaatattttttcttgtctgtggcttttttccttttcttaacagtgtctttggagaatagaagtttggcgtttgtgggtttttttagatgaagttcaacttactagttttttgtgatttgtggattttatgtctaacctaagaaatgcttgcctgactcaaggtcacaaagatgttctctcatttttttctagaaattttagttttagtttttatatttaggtctatgagccatttcaagttattattatttgcatatggaagtcctttttttggggggagtggggactgggtcttgctctgttgcccaagctggagtgcagtagtgcgattacagctcattgtaaatttaaactcctgagatcaagcaatcctcctgcctcaacctcccaggtatctgggactacagatgtgcaccaccatgcctggctatgaagtccaatttttcagtcattttttgttgaagcaactattgaatcaccttggcttctttgttgaaaacaattgaccatactggtgtggctctacttctggactcctctctgtccctttatgtctattcacacatcaataccatgctgtccatgcctgtagtctagctactctggagactgaggcctgaggaaaacttgaccccaggaattcaaatctagcctgggcaacacagaccctctctcttattattattattattttttagatggagtctcgttttgtcgcccaggctggagtgcaatggtgtgatcttggctcactgcaacctctgcctcctgggttcaagtgattctcccacctcaacctctggagtagcagggattacaggcacccaccatcatgcccagctaatttttgtatttttgtagagatggggtttcaccatgttggccagcctggtcttcaactcctgaccttaggtgatctcctgcctcggcctcccaaagtgctgggattatagatgagagccactgcacctggctgggaccgtctgtcttagaacaaccacagcaataaaaaaaaaaaacacaaaaaaccacgatactgtcttcttcactgtattcttttcagagtattgaaatcaggtaatatacattctcaaattttttctttcttttataaaatagatttggctaatctatatcctttgcatttcctttaattttttttttttgagatagagtctcactctgtcgcttaggctggaatgcagtggcgcaatcttggctcactgcaacctctgcctcccgcgttcaggcgattctcctgtctcaggctcccgaatagctgggattacaggcgcgtgccactacgccgggatttttttgtatttttggtagagacggggtttacatcctgttagtcaggatggtctcaatctcctgacctcgtgatcagcctgcctcagccttccaaagtgctgggattacaggcgtgagccactgtgcccgaacttcctttaaattttacagtcatcttgccagtttcaacagaagagccttctaggattttgataaggattgcattgttctacagatcaatttggggagaactgacatcttagccatatagaatcatctgatccatgtatgtcatatccctccctcctcacccctttcttcttcatcagtctgactagagatttctcaatcttactgaattttttctaagaaccattttttgttttattacttttctatagtttctgttttattgatttctgcttttcgtttatctgtttcttctgctgactttggtattctttatttagtctcttagtgaggaagcttaaatcatttatttgaggcttttctaatttagcagtattttcagcatcagcgctgttgacatttggggctttataattgttgggggactgtcctatgcacgacaggatgtttagtagcatccctggcctatagtcactagatatcagcagcacccctctccagttgtgacaaccaaaagtgtcttcatgtattgccaaatgtcttgggcatgggagaattgctcctggctgagaatgactgctatagtaggcattttatgatagaaacctcagttgtgtatcacaaattttgacatttttttcatttagttgaaaattttttcttagtttcctttgcgatttcctccttggcacatgcaatactatatttttttaaacttttatttttttagagacagggtctttctatgttacccaagctatctttgaactcccaggctgaattgttgctcccacctcagcctccctgagtagctggggctactggtgtttgccaccgcacctggctgacccatacattatttgtaagtgtattttttagttccaaatatttgaggattttccagaaatattcctgttactgattgctaatttagttcttttgtggtcagagaacacacttgaatggcttcaattcttttgaatttgttgaaatgtgtcttatggtcctgcatgtgatctattttgggaattgttcagcgtgcacgtgaaaataacgtattcttggatagagttgtctataaatgtcaattgggtcaagtgggttgatagcgttgttcaaggtttttatattctggttgggcgtggtgggtcatgcctgtaatcctaacactttgggaggccgaggcgggtggattacttgaggtcaggggttcaagaccagcctgaccaacatggtgaaaccctgtctgtactaaaaaaacaaaattagccaggattaatccaatatggcaatatctgtcttttaagtaagtgtttagaaaccatttccttttttttttttttttttgtgaaacagagtctcactctgttgcccaggctggagtgcagtgggcaatctccgctcactgaaacctctgcttcccgggttcaagtgattctcctgcctcagtctcctgaggagctgggattacaggcacccacgaccacgtctggctaatttttatatttttagtagagacggggtttcaccatgttgcccaggctcatcttgaactcctgacctcaagtgatctgcctgccttggccccccaaagtgctgggattacaggcgtgagccacagcgccgggcaaccatttacatttaatatgttgatacagaaaggtttatcatcttgctatttcttcttatttatcccatttgcttgttctttttttcttttttgctagctcctctcttttttattgaagtactactccacaatgctgccttctttgagactaagtacccgatgccattttacctccacagtggagataataatattagaccatgtcacatatagtgtaagagtcttacctagtaacttctatttccctccatcatttttatgttttatgaaaatgttattactttcatatatttaattctgcatgtgctaagaactccacactgtactgttatatttgcttgaaccagttatcatttaaagagattaaaaaggtaaaaatgggccgggcgtggtggctcacacctgtaatccccagcactttggaaggccaaggcgggtggatcacctgaggtcaggagttcgagaccagcctggccaacatggtgaaaccccgtctctactaaaaatacaaaaattagccgggcgtggtggcgggcacctgtagtcgtagctacttgggaggctgaggcaggagaatcgcttgaacctgggaggcggaggttgcagtgagctgggatcgcgccattgcactccagcctgggtgacggaatgacacattgtctcaaaaaaacaaaaaaaaaaaacaaaaaaaacccccaaaaagtaaaaatgtttttttgattttacctataggtttacaatttttggtactcctttgtgcagatccaaatttccatctcatgtcattttccttttgcccgaataactaacatttcttgtagcgtagatctgctagtgaagaatcctgttgggttttgtctaaaaaaatctgtttcttgtcctcatttttaaatgataaggaaataaacctggggtctcagttcctcttccccgcccctcactgagcagagttcttatgcactgctgccatgtgggaggtggagatgggttcagaggtttgtgaaaagcttgacgcgctgcacgcccactccacagggcacctttagaggcttcttggggaagctggtcgggtagctctgactcctcgcatctctgtgtgtccttgggaatgtcaggtggaagatcgatgtgcatttgcaaatgggagtgagtgtgagaaaagaaaaatgtggggttgtggctggtagggtgtgttcagggagcaatggtgacctctgttgtctgtgctctcccaacagttctgggattgtggggaatgcaattgttctgtatcccttttgtattttggaagttctccgtgaagtctaactgcaggtcatattgtcatttagtctagagttggaggatggatataatttcatgagtatgaaataatatgcagagttgttggacaccaactgggcccacccactccaccagaactcaggtctccttcatttgactcccaccggcaacgtcactcactttaacacctgaattactctctcttagataccagaggggaaacggaggcatgcaggtgagaacgtggcagcagtccctaaaagtcacttctggtgctggccctggctcatccgtgccctgggggagaaatgcaagtgtcagagctgcggaaaggagctgagatctagcagggctcgcccttatcaacctccgcctctaacaagggccacacagcacgtaggggagattaggccgatctgcctgcctcatcgcgggaggccaggagggtggaaggcagcggatcgcgccctagcgagcaacccacatgctctggaagtgtggttcaactttcaccaggctactgcgggcggccggccagctgtcagcgggcactccgcccccaggagctgtccgcaagcgcggggcggtgggcaccgcggggaacagcccccggacagccagtggcacgcggagacctcggagagcgcaggccctgctttcccgtaggaacactcgtgggcatcgggtcgcccgcttcgcccccgcgctctagacgcactttcctgccgcctggcgatgtccgaagtgcatatcagagcatggacttggtcttcccagcgctaccagaccgctgagcctccccgcacgtggtggggcgcaggcggggcgccagctgcgcgggaatccgggcgagcgcgctccacccgggcagtgcgggcctggagcgccctctggcgggacggtgcgcggcgttgcgcgtctccagccttgggattggcccggactcgccttcaacgcaccggacagcgctgccaggaggcagagctctgaaaacctcgacaacgacgcctctctcttcagtgcccgcactgcgtcccaggctgacgccaaggaggcccaagacagccctgggtggccattaggacgggtctggaggggacatcagtgtggacatctagttgctgggcctggggtcacagccccctttcttgtctgaactggccactgcccggaggagctgcgctgtgcgccttagtgtgccaccacctaaccgccatcgcggctgagcccacctcctttcccggacattagaggacgaggggtgcgaaggtcggggaaagctgggggcatccagatatccagagtagaggaggggcctcttccctgcgtggatgtgcatgggaaggattccaggaatttaattttcttttcttttgagatggagtctcgctctgtcaccaagctggagtgcagtggcgcgatctgggctcactgcaacctccgcttcccgggttcaagggattcccctgcctcagcctccctagtagctgggactgcaggcgcgtgccaccacacctggctaattttttgtattttagtagagacgggggtttcaccatgttggccaggatggtctcgatctcctgacctcgtgatctgcccgccttggcctcccaaagtgctgggattacaggcgtgagccaccgcgcctggccgaattttcttttttcttttttttttctggagtcatcatctctccactcgcagatagggagtcagcgtggtttgtatgcaggtgggagggactgagcccctgaaaatggttaggattgtctctggcctcagccttggtacacacatcacaggacaaatcaagcagacagtggtgagtccgccacagtgggcaaatttctacccgtgccagacagtgtacaggatcttttgtttttttttctctctctctcttccttttgagacaaggtcctgctctgtcacccaggccggagtgcagtggcgtgatctccactcactgcaacctccacctcctgggctcaagcgattttcccacctcagcctccccagtagctgggattacaggctcaagccactgccccccgctaatttttgtatctttttgggtagagatgggtttttgccatgttgcccaggctggtcttgaactcctgggctcaagccatgtgcccgccttggcctcccaaagtgctaggattactggcgtgagccaccttacctggtggggcacaggattttaaattaaatttttttttttttaatttttagagacagagtcttgctctgtcgcccaggctggagtgcagtggcatgatcttggctcactacaatctctgcctctagagttccggcgattcttgtgcctcagcctctctagtagttgggattacaggcgtgcaccaccacacccagttaattttttctatttttagtacagacagggttttgctatgttagccaggctggtcttgaactcctggcctcaagtgatctgcctgctttggcctcccaaagtgctgggatcacaggcgtgagccactgcgcctggcctaaatttttcgtctttaagacggggtctctctctctctgtcatccaggctggaatgcagtggcacaatcatagctcactgcagccttgaactcctgggctcaagtgagcctccagcctcaactttctaagtagctgggactacaggctgatgcgaccatgcccgacttggcacaggatttaaatatggccctggacaagtcactggccttctctggccttcccaggtaagcttggactttctgggatgcttcaagttcaaatcatcagtggtacaactgttgaacaatatgaggaacgctgcgggttactgggcctgtgtggacccgttttggattctaagctgggtcctgggcagaagttggaggctggggcagctgcaagcaggacaggcaggtggccagagggcccagcagcttcagcactgaggactggactgggtcgccacgcccaaaggaaggataattactcacctcccactcaagaagcaggcggcagaactgttttggagagcatggcttggggcctgggacctatgttcatgcggtccagacggagatccatgagagttaagactctttctagatatcaggtagcacttctgattacaaaacttttgcacatggtctcctctctgctttacaacagctcaggaaagtaggcccaaacatccactttaatagatgagggagctcagagggggtaaccaacccctccaggtcacacagccagggagggggttgagccaaggttcaaaccactgcctcggttgttgcagatacatccctgcagacacctttattgaagagggaccctgaaggctgaacggccaacacagaagaggaggcacttgggagtaagggtgatttatggccctgggagggcccagtgcaggtaggatgggagctaaggtaaggctgggccatgcctagctgcaagcaaatttccttaaaaaacaaacaacaaaaaacattactttttctaaacctaaagtttgtggtggcattcaagtcccatcatagcccatctatccagactcatctgcctgggatccccgtcttgggactagtggtcactggcctgcttcctggtcaattagcttccgggactagggggaggtgtgaggagcctagagtgcaaaatttaagaagcactcagtctcaggggcgtgcaggtgcagggtagcgacggcaggactctaagagtgagtctctttcctccccgtttccccgtcctactttcactctaagcatttagttcccaggggacagagacgacttcttcattagaagaccccggggggtccccagcccggaagggctcacagttggagctcaaacatttgccactgttcaggctcatctttctttccccagtgaaaaatggtctaggttgggaagggcaggttcctgtctactgcgtgatccaaccgattctggttcgcccaatgtctggacttgtcctttgccaagaataagcagatgagatgggcggatgaaccccaatgtccctgcaagattcaggaagtcccagccagaaagtaaaggacgtttagttccatgtattgttttcttttttacatgcggggcaacacacctggacagtgtcgatggcttgctccaagccacacggccgcatagggacagggactgggctacataacaagttcttcgacgctgtgatctaatcaaggaaaacctgggacgcagctaatagatgcgcatcgagtgtatcgacgctctaagtacgagggctggaacagtgagcaggatcagtccattgcttttgcctacctgctgagcgctgattggtccccgtttaggaaacggaaaaaggggcgtgcacgcgggcgcggctgcgtgagaggcgcgcggcggcgcagtgaacagtctccttccacaaaaccatggcgtcgctcaaatgtagcaccgtcgtctgcgtgatctgcttggagaagcccaaataccgctgtccagcctgccgcgtgccctagtgagcggggaggtcgcggggtccaggggcgcgggtgtccggccatggcgggagggcgggaggccgggaggccgggcgggagcgggcgggctgctggaggggccggggaccctcggggctgacgcggcctgtggcctctgttgttacagctgctcggtagtctgcttccggaagcacaaaggtgagccccgtccccgccagccctcgtaccactgcgcacggggcagcccccacgtccagcctccgtcttgggggcgtggacccttgggctgcgcttcctttcccgcctcgggtctccgcgggttctgcaggaaccttgcttcctctgacttggtccctggtgtctctgtgtgtcggacagttccctctgttgtccctgcctgtaatcgctctcagggttttggtcagtagcctttcttctaccccgcttctccttctgcgtgttactcttttttgcttagaaatagtttccgattgcttttcccaccgaggtctaccctagcagtttcttcctcagtattctgatgtagcccctcaccatttggctgaaactgcgctaactttaacagtattttcactcgtgtaaataatgtcttgttagaaacaaagaggtaagtccatgtacaatacaaggagacgtccttgatttgttaagagaaaaaaagaaccaagtaagttctgtgtatgatgtgaacacacttttgtacagttaaaaagaagtgacctggccgggcgcggtggctcacgcctgtggtcccggcactttgagaggccaaggcgggtggatcacctgagcccaggagttcgagaccagcctggccaacatggtgaaactccgtctctactaaaaatacaaaaattaggcgggcgaggtgcgcgcctgtaatcccagctactcaggaggctgaggcaggagaatcgcttgaacccgggaggcggaggttgtagtgagccgaaatcgcaccactgcactccagcctgggctacagagccagactcagtctggaaaaaaaaagaaaaaaaaaagtttgatgtaggtggggcgcggtgggtcacgcctgtaatcccagcactttgggaggccgaggcgggcggatcatttgagctcaggagtttgagaccagcctgggcaacatagcgaaaccccgtctctataaacaaacaaagccaggcgtggtggcctgtgccagtggtcccagctactcaggaagcagaggtgggaagatcgcttgagcctgggaggaggaggttgcagtgagccaggatcgtaccactgcactccagcctgggagacagcaagactgtctcaaaaaaaaaaaaaaaaaaagcttgatgtagattctttcagcttatttccactcttgtaccaatatatagaacttttttttttagcttttagaatctcagcaatgagactgtacccaacatcctcatttgagtttatatattgggcactttttaaaacctagtgcatacaggctgggcgcagtggctcatgcctgtaatcccagcactttgggatgccaaggtgggtggatcacctgaggtcaggagttcgagaccagcctggccaacattatgaaaccacatctctactaaaaatacaaaaataagctgggtgtggaggtgcgcgcctgtaatcccagctacttaggaggctgaggcaggataattgcttgaaccatggagacgcaggttgcagtgagccaagactgcaccactgcactccagcctgggcaacagagtgagactccatctaaaaaaaaattaaaaaaattaaaaataaagactagtgcatacaagttctagctcactgacttaaaggactgtatgttatttcattatatagttggtacgaccattatttatataaagcctcctattggttgatttttctttttaatatttgtttttaattgacacataattgcatacaatttgagttacagtgtgatacttcgatacctgtatacaatgtttaaggatcaaattagggtaattagcatattcgccccaaataatcatttcttcatgttgggaacactcgcaatcctctcttgtagctatttgaaagtataaattgctgccaacatggtcacactaaggtactgtgtaacactagaacttattcctcccatctagctgtaattttgtatccattaagcaacttctccctagccccctacactctactcttcctagcctccagttaccactattctgctctctacttctgtgaaatcaacttgcttagcatccacatgttaacaagaacatcttatggtgcctggcttgtttcacttaacattatgttctttgggctcatccatgttcctgcaagtgacaggatttcatggttttttatggctaatatccagtgtatatatgtaccgcatttctttatccatctgttggtggatccttaggttcattccttatcttggctgttgtgactagcagtaaacgcaggagtgcaggtatctcttcggcagactgatttcatttcctttggatatatatacagtagtgggattgctggatcatatggtagttctattcgtagtttttttttaggaacctctatgctgttttccataatgactatactaatttacattcccaataacagtgcagtgtataagagttcccttttctccacatccttgccaacatgtttttttctttttgataatagccattcttactgtggtgagatgatacctcattgtggtcttgacttgcatgtccctaataattagtgatgttgaacattttttcatgtacttgttggccatttatatgtcttcttttgagaagtgtctgtttggctcatttgcccattttttttttttttctttttgagacagagtcttgctcttgtcgcccgggctggagtacagtggcgcagtctctgcttactgcaacctccgcttccagggttcaggtgattctcctgcctcagcctccaaagtagctgggattacaggtgcctgctggctgatttttgtatttttagtagagacaaggtttcaccatgttggccaggctggtcttgagctcttgacctcaggtgatccacctgcctcggcctcccaaagggctgggattacaggggtgagccaccatgcccggcccatttgtccacttaatttttttttttttttttttttggctgttgagctccttgtgtattctagatattaatcctttgtcaagtgaatattttgcaaatattttctcccatcctgtgggttgtctcttcattctattgtttcctttgttgtacagaagcttttttgtgtaatagaattccatttgcctatttttgcttttcttgcctgtgtttttgagattttattcataaaatctttgcctagaccaatgtcctgaagcatttcccctgtgttttcttgtagtagtttcaggtcttacatttaggtctttaatccattttgatatttatatatggtgacagataaggatctagtttcattcttctgcatatggttattcttacagttatcctatttttccagtaccatttattgaagagtgcttttttccccagtatatgctcttggtgcctttgtgaaaagtcagttggctgtaaatgtgtgaatttatatctgggttctctattctgttccattgatctatgtgtctatttttatgctagtaccatgctgtttagatattatagctttgtagtatatttcgaggccaagtagtggtgatgcctccagctttgttctgtttgctcaggattgctttggctattgggggtcttttgtggttccatattaattttagaatttttttttgacatttctgtgaacaggatcattggtattttgatagggattgcattgactctagattactttgggtagtatggtcattttaatatttatttttcttattggtggatatttacattaattttgcctttgttgctgctataggcagtgttaaagtggtatttaataaataatttttatcagaaatttctaatagccacatctgttgtacacttttcatttgtcttttttatttttttgcaacaaagtcttgctctgtcacccaggctggagtgcagtggtgctcactatagccttgacttcctgggctcaggcagtcctcctacctcagcctcccaagtagttgggactgcaggcgtgtgccaccatgcctggcttatttatttttaattttaatttttgtggagatgaagtctcactgtattgcctgggctggtcttgaattcctgggctcaagtgatccttccaccttggcctcccaaagcgttgggattacagacgtgagctacccatgctcagcctgtcatctttcttgattcccatgaatatctgctgtgtttggctttttctttcttgatattctttggaggctgggaagataccgctctgtggtattctctcctccctttctcccttcgaagtcctaaccaggcctgaccctgttacagcttctgaggtcagatgagatagggtgcattcagggtggcttagctgtagactctcgttttcttttttttccttttttcgagacagggtcttgctcttttgcccaggatggagtgcagtggtgtgatcacagctcattgcacccttggcctcctgggcccaagtgatcctcccaccttagcctcctgagtaacggagacaaactttatctatttttcgtagagacagggtctcactgtattgtctaggctggtcttggactcctgggcttaagcagtcctcctgcctcaacctcccaaattgctgggattacaggcaggagccactgtgcccagcttctccttccttttgctagatctctctcttgaaatgtggtccttgacttttattcctaggtaggtgatctctctttcactttaaacttttttttttcttgctgacatccaactgtttagctccagcctctttttgagcaccttagacacaaatgtattttggggtcaggtacaacccagaaaattcacctctccttcagtccctcctgctgtgttccttacacatatagcatagccgtaaagttagacccggattccaaatctgcctctgctacttactagctgtggaccccaatggacaagtttattacaagaaaatttaatcctttcatctgtaagtggaattaacagtctccatgtcatgggggcttcgtaaaggttcattgagccactatgtatctcactgtgtacctggcacagtgctcggcacttagtcactggcagctgttgtaactgccacctacatgactagaacctttccgtagcatattgtcaaatctacattttaagtctctacaatctggtcctgcctttatgtcctcagaaccctttcctgtgacttcatgctctgttgatactgtcacccaggctggagtgcagtggcacaatcacagctcactgcagccttgacacactgggcttaagggatcctcctgcctcagcctcccaagtagctgagaccacatgtgtgtaccaccatgcctggatgattttttttattttctgtagagacatagtcttgctaggttgcccaggctggtctcaaactcctgggctcaagtgatcctcccaccttggcctccgaatgttaggattacaggcgtgagccagcacagctggccttctgttgactctgtaagttctttggtggttttgcccctagttttatcccatctggtatctggtttacagcagctatttcaaacacctcagttaattgtggtgagaattttgtaagattcggcagggtagggaggatggggacaggttcttggggtgcatgaatgagtcctgctttctcagcctgctggcggttttccttaatctctctcttgctttgatctctcacttcttccacattcctgggcacccacccacatcccttaccccagacacttgcttcctacctagatgctaccttggtagggaggtgcagccttgtcgctgaaatggaggtaatgtgggcctgggatttgtgtctttttcagaacagtgcaaccctgaaactcgtcctgttgagaaaaaaataagatcagctcttcctaccaaaaccgtaaagcctgtggaaaacaaaggtgggttggttgacttcaaacaaatctacaagggacttcacatagaataagtcgaaggaaaaggggagagtggggctggtcagggaatccagaacaatagcttcattgggaaggaacagcttccttagccttgagcatcaggagtggggccatgtcatcatgggtgatattgaggcaacagcctgaaagcagtattcaggagaagaaaaatgggcagaagacagagatgagaaaggccatggctgtggtttgggggtttgcggtgggccctgctggcaggagccttctctagcccatagctgctggtctccctccatgaatctggctgggactgtcagttcacctgaactcagcccaggcaggaggctttctttgtcctagatcatctcgctgctgctgggggttcagagctcacagcagtagtgggctgtcaacccatccgtccagccatctaaacgttctttaatacctcctgggtgtcaagcaccatgccaggctctgaaagcagcccctctggtgccaccaaagaggtattgaacattcactccaaaggcatggcccatttttgccctttgagaaatttccaggttgggttcaggcaatgccagcagtttctgcccatgctgaaagcacaggagattctacttggctggtttttacagagcatccagttaattggcccatcacagggttggagccatgttgaggtggggatgggtattaagttattagacaaccggggtctaagcctaaagaccacaggaccacatatacagtaaggatgtgaacactagagtgcatttgttaaaatcaccaattctttcacttagcctccctcttctaaaaaaggagtgttagtatagtcacagactccggagaagaggatttttgtctgtacctgcttgaatacccctatcactatcacatgtgcgtgcacacatttttatcctgttcaagtagtggttaaaatctggtgcccaggcctcctttttagccatgagccattgactgttttgtattccttagatgatgatgactctatagctgattttctcaatagtgatgaggaagaagacagagtttctttgcagaatttaaagaatttaggtaagtctgtgctatgcttgtcaatcgttgagatacatttactgtgttgtaaggattgtgattttttaaaaagtttttaatttcttgaataagtatggcatgtagggctcttactatctagccacataatctgtaaacatacagggtttcacacctcccagcctgcccacaccattccttctgcctggaatcctgctggtcttgtgggttggcaaaattctgctcctccttcaagccttggttcaagttttcttcactcagctaagcttttcttgaccttttgtgtctctttcagaattaggcacttttttggtttcccatagcaacttggacttaatagtaataaatcactgttacatttcatggtaatttgtctctcacataccgatttgtacagcagggacctgtattcccagatccccagtgctcagctcacagtccagcccttaacacaaactggttatcacatgatttgatttagggggaaacaggtgttgccatttttgtagcactgcttattcagtccttacaacattctgttacatgtgcatggggtctgttaatttcattcttcccatttcacagaatcatgttaaaaggttatgttttgcacttagtctcatggtaatgattagttagactgagtttggagatgagctagtaataggtgtgaaaaattttacagactgtgaagtaccatgcaggtattattgttggttccctgctactggtgctgctgcatgccaaatggcatgcttagacatcattcagattatttcgtatagccgtcttcaccactggcaacttttatggctagaaagaaagaaaacatgccagcagcttaatgctactatttgctttgtgattgtgctgataaagcatttttttcttagctgaagtggcacgaagttacaatatttacaaagataccaagaactggtatctgttactgcatttaatgcggaaatagtttgatatgctggtcttacctttcattttatagaggtggggtctcgccatgttgcacaggctggtcttgaactcctgagctcaagcaatctgcccaccttgacctccccagttgctggtattacaggcatgagccaccacaccttgctgatagttttattacacttgaaatagctcttcacttttcagccatctccatgtgtttccacttgaactcagactggctttttttcttgttaatttttaggggaatctgcaacattaagaagcttattgctcaatccacacctcaggcagttgatggtcaacctcgatcagggagaagacaaagcaaagctcatgagagcttacatgcaagagcctttgtttgtggagtttgcagactgctgtttaggaattgtggagccatcccagaatgaggagtcttaagatggattattgtgctgcttgctcaagcgtgtgcttgactcctggaacctgcctgctccctctcccagaccagctagtttggggctggggagctcaggcaaaagaggtttccaggatgcagattaggtcatgcaggcctttaccggcattgatgtggctcatgtttcaggcagacttggggtccttaaggtggcaagtcctttatggagagaaaacttgacattcagatgattgtttttaaatgttttacttttggtacagttgatagacatcataaacgatatcaagcttacacttcatatggagttaaacttggtcagtgttaataaaatcaaaacgtgattctactgtacattgcattattcataatttaattgtttgaaattacattaaataaatcaactaattaaatactaaagttttgttcctttttaaaggaaataaccacaagatttttcccagcccaaattccagcgccaattttaggccaactttggctgttttcttccaaaagtgcttatgtggaattgggatccccagtgtagtgacagacagtcatgactgctgctgagtttgatctgtgaaggtagtgaaatgtggccctgatgtttcttaaccctgatttggtaactaccagccctgacaccatcagtgcttgatgtagcctggaaccccaggcccactgacgcactgggcacggggctctgggtcgaaggctggagccgtcactgttgttcatgtgcatttggagcactgtgggaatagtctggcagctgtgtgctgattaaatgtctttggcaaggcagggggcaggaaaaggccttgtggaaacaaaggcaccaaggatcaccccagcccagtgaaggcagaagaggtcacgtggatcagcctgtgtctttccagcagaatctgattaaagcctgtaatgctgtagggtgaaggttcagggcagatgtcagcataccgcagtggagactttctgcagtgaaactttatcgatccctagaggggagagagagatgcagctttagcactagttcctgggagtgccagggcctaacaaccccacagagcagacgctaaaaatgcaagaaggtatggacaagtactagtattgggggccacagcaggattaaaatagcattacatccactcagtgtgagacagatgaggaaaccctaggaggaggcgctccctaagaggaatgtctgtcacattcctatgactgcttaaagccagaagggcaaaacatttacccttctgtttagcaggcctgtgtgttttcatgggagacttcatccagattaaggcctatagttattcctctgaatggaaatttggtgtttccttctgccttgtcatttcacttactccttgctgtgactccatgcagtaggttgagtattagcccattttatagacaggctccgagaaaatgtgtcttagccaagatcatccagtgaatggggcagaaccaggatccagaccctggggttctacctcccagtgcaacatactttcacctttcctcggccactttaattctatgaggcctggcttactggggtgactcacaaagccctgagtgacaatgacttcctgagtgtgctggctgacttttccctggatgcttatataaaaacagctgggcacggtggctcacacctgtaatcccagcactttgggagggcaaggcaggcagaccacttgaggtcaggagtttgagaccagcctggccaatatggcgaaaccccgtctctattaaaaatacaaaaaaaaaaatatagccaggcatggtggcacatgccctgtagtcccagctattcgggaggctgaggcaggagaatcgcttaaacccactgcattccatcctgggcgacagagtgagactccgtctcaaaaaattaaataacatgaaaaaaaaaaaaaacccacagagaacttggaccactgaccctgcttgtcatttcgtcagccagaaaaggaaaaaaccaagcaatacaatttggggaaaacatggtgccaaatccagtgccatttgaggtaacaaactcctcacaacccaagttgtgatgtgggactaattagattatttgctctcaagtcttgggtagtttcttttttgctatgtctcgtgaatttttcctcttttctgtaattgacctattattaccctaaaccaaacttttttttttttttagatggactctcgtcctgtcacccaggctggagtgcagcggcgcaatctcggctcactgcaacctctccctcccagattcaagcaattctcatgcctcagcctcccgagcagctgggactacaggcgcctgccactacgcccaaccaatttttgtatttttagtagagatggggtttcgccatgttggccaggctggtcttgaactcctgacctcaggtgatacacccgcctcgacttcccaaagtactgggattataggcgtgagccaccgctccaggccctaagctaaactttcatcacctcctgctcctgactcatctaaagccttggttctcacagtgtggttcatggagcatcagaatcagctgggagcttgctagaaacgcagcattgcatttggaaatgggactagaagatttagagatgctgaaataattagaagcagtttttaaaaagataaagggctctggaagattcccagttataacaaaataaataatccaaacctgcagctgattgggacatgcagccctctggtttacccagtagggttagggatggatcttgtcccagcctcagtctcattcccgctgtgaacttgtaggctttgctcctgctgttctcaggaacaaagctgtcatggccatcacacacaacgtacctgaggcagcgctcggatggacgtgacaccagcctggtcttgtgctgtctggacagtgtagctactggggctgcccctggggagctggaggcaagcccagaccactaatttcctctgaaagctgcctacacccatagccgtattggccaggaccagtcccaggggccagaggcggattattgcctccaggagcctggtctgcagcggcgaggtgctcagggaacagggagcttgagagaagtgtttttcttccacaccatccagctctttagcagcaaggcaggccattctgatcttaaaaagcaaatatccctttatagctttagatttatctagccctcttagcagaaaatggaaatcaaaactatctttaacaaatcatcttaacaaggtgaactgaaggcacctggttgcaaacagctggctgccctgaaccaaactggttccatatgccacaagtctatacaccccaggcaactgtgcttaggccttacatatgctacttgaaaacaagataagagtccatcaagatataactgatatgccataaaacccagtcttctaaagtgtacatcccagagtttggtatattcccagagttgcttataccactcttcacctacataaccaccctgcagggtaggtgttactgtgcccactgcatacatgaggaatatgaggctcagagaggctaaacaacctgcccaaggccacctgcattgcagtggcagagccagcattcccactcgggtccatctggtccccaaaattgatccactgcccaccccgacttcttgggtcttacttactctccacttctgccatgcacgcttgatgactgtggcagctgcatgcagcctctggatgtgtttccgagttaaccaggaacgaatggctaagaggtttgcccagaaacaggaaagagataataaaggggccattagagctgtcagtgacctcgctgcagcagcaccacagttgctgtcaaagtttcaaatacgttttttttttttcaataaattgctacaaataaggttctaaaatcaatacataaggcaaaattggcttttaaacattccttacactgcccacacacttgaatacacctacacaacacagtgaaggggcactggggagaaggactggctgagggcccagcaatcacttcccgtctcaggctgggtccaggtcagcacccagggaatgggaggggtctggattgtctgtgcctttaaaaacttttttttttgttttgtttttaatcctcagttgaatttgttcgctttatgcatccctgatctcacatcaccatatacccaaacactgatacaattaatagatggtggtaatttttattcccttctctgcaatttcagcatattctttttctttttgtttctttttttttttttttttttttttttttttgagacagggtcttgcccaggctggagtgcagtggcacgaacagcttattgtagcctccgtaaggctgtagcttcaatctcccaggctcaagcaatcctcttgcctcagcctctggagtaactgggactacaggcatgtgccaccaggcacggttaattatgttttgttgttttttttttttttgagacagagtcttgctctgtcacccaggctggagtgtaatggtgcaatctcagctcactgcaacctctgcctcctgggttgaggtgattctcctgcctcagcctcctgagtagctaggattataggtgcatactaccacacttggctaatttttgtatttttagtagagaaagggttttgccatgttgcccggctggtatgaaattcctgggctcaagtgatcctcccacctcagcctcccaaaatgctgggattacaggagcgaactactgtgcccagcttccttatacaattttttaatgcctacacacacacaaacacaccttaaaaggagggcatcgcccttaatatgtagtttgacatctaggtatgaatatcattttggaagtggttctccattaaatttataatattcttcaaaaacacttagctgcatcatagggatggtccagtccatcatttggccatgatgtcaccactgttagatatttgggttctttccaacacttttccttttcaaaataagaccactatgaacatgttggttaatacatcttttcatctgatgaactccttttggtttttaccttctccttaaattcattccagccctagagcccagcaggtaatggtttgagttgtcataaagggaaaaaaagttggcctaaacagctgtcagggtctgagaaaggaattaaagacaacgcttagacaacgcttagcctccacttcttacagagcacctttgtttgtggagtgacttggtttccattgaactggagagacgttatgagtgagggggacagggaatttgaatcccagcacaccacagggacatctcttcaggctgggacacagcttcaggagatggggactcgacgagctatgtttcaaaggaaaccaacatcctgtggggtctgtgagcagtgctgacaggtgacctgcccacctacctgcctggatgagcatgacggcccgccactgccgctcctgctctcggtgccggtgtcgcctccagccaccctggatgcagcgggcacactgctccagcacccgggcacgcccacattccagaagctccagctgggagaaaaggcatccattgagggcagcctcttctccccctgccccctcctgctgaggagagcacacagcttgcctctgtaacctcctcatccccaaaccagctcaccatagagtcagtcatgaacaccttggtcctgccacagtgcatgggggctggcatggcctcagccgagtcaccagttatggctgctgcctgagttaggaccggcagagtgtggagaatgtcctggatgagaggttcaagcgtggcttcctcgctgtgtggacaccattctgggggagggagatggccccatcagtgcatggtcatctctacatgcctctgtggcctgaagaaactggctttggcctccctagcactctacaggtctctttcctgctgttcttggctctagccattttctccttgttcttcttttggaggaagccacaaacagcctctctgttgtccctcagggtgctagctgttccgtggagccttggaatacccacttgcgcctgtgtgtcctggggtgtcccacagcctctactgccatgagtccctttgggcaggctggcagagggtgcttgacacctggaagggtgactccttccaagcttggaatcccaggctgctcagccagcatttgtttccaaggcccaaacacacatcctgagggccaaatagggcagctataggccactccctcagccccgacccctcaactccccaccatgtatgggaaaagggagatccaatcccagcccttagtttgggaatcttctactgcaaataaaaagaataaattaaaaaataaatttaaaaaatcccagccctgcaaaggtcccgtgtcccactgcctgccctcccgcagctcgcagagctgactcctggagaggtaggatttacctgagggctctgaccaccttagatgcccagtgcctctctgaagacagaggctgccaaaggagacaccacagatgagaaacagcagcaaaatcaaccaggggccagaagggctatgggcaagagacacggaacaggacagcaaaccatggagagggagaagaaaggagaaagggtgaaaggaaagtgaaaactgcccaggaggggaggaaacaaagcaggattgccccaatggctgtgaggggcccagggtaaggctgggtgggaggggcagaggtgctgggctggggtcctgccgaggcggggccccccggcagcctgtccttggcctgttctccctctgcctgtgtctgggccctgtggctcccacagcctctcttttatctgcatgccgacaacccccatatgagggcctccagatccttcctttgagactaaagcctgcctaagtgccttgcagacttcttcactggacctgcaggacaagtcacccatgcccgggctcttcagcctccctgaacctcttttcctcttgcttttcctcacttcccaggctaagttaatttactcctttcctctccctctacatctagtcaagcccctaccaagactgaccagtttcttccaacaaatatttcccgactgtgcccacaattcttgtttctctctattggggcaactttgcagcctcaatcccacagccctccatggtgcccccagagtggtctccagaaagtgtgaggctgataagagtcatttgctccttcccctgcagtgcctgctcatctgcccagagaataaagtccagattccttgatggagccctacctgccactccagcctcacctgccccagttctctgcctcaatgaaccagcaacacagaactggctggagttcctcatacccacactgctgcctcaagcctctaggcctttgttcagattacatttatcatgtggaccacccatcacctggctaatccaatttattctcagatactacctcttccaggaagccttccccaattcacacctccctagcaccacccacagcatcctgctcatagctctgcttttccactttccatgctatttgtcttttttgaatctgtttcccccactgaaccaaaaccagggctgtgttttattcaccagtaagccccagcccctagccctaagacagggcacagggtagatgctcagtaaactgtggttgcacaaatgactaactcatgggtcccactcaccagggagccctttggcaggatatgggctgtcggggccagaggatgtgcaaggatgaagccttcttagtaacttgtatcgttctacaaagtttcggtgagagaccctggaggccaaagcaggcagaagtagagaattacttcatctgtgagccaggttaacggttcagggctcatcagaagttattctatttaatctgctcaacaacacagcacggtgctgccctccccgagtatccccactgaatgtgaatgtggttttgaagcgatttctaggatcacttagttggaaacccataaagactatttaaaatgggtctgctctccctgctgccttggtctaccaacacaaagcatctcttgtgttagcaggggatttgcgggctgcctccctccaaaggggctgacaggcctctccccaaacaattggaccagtcctatgacgcagacatgcttggccacatctcccctctgacctctctgaccccacagtctcctctgcctcccccagatctccctgctcctcatcaaggcaacacttctcagacagctgctggcacctgatatctgcacttcctcccaattgcttgtcagccctcctgagtctggcttctgtccccaacattgtaccagtgtggcttttgtcacagccatcagctgggtacaaaatagtgcacaataagtgaatggatgaacgaatgggtgctgctccctagttcccagctgacttctacagaccagcctctttctcttcatttccacatctcactctgggttgggcaggctcttgcccaatgagagtcctgagccccactctgtactggccctgcactgtgccgtgatcgagcccactcaccggatggggaagccagcagcactgatatggatggtctccacgaggccacaggcctccagctggctcaggacctgcaagggtggggagacagggcaggcacctgcagcatggggccagcaggccagaaatgccattctctcagcccttcttcttagaccctggccagtgccaagctgcaggctctcccaaggcttggctaatgggggtatctccttggggctgtgagaaatcgagggaccttgaaaacaaatctcccactagaaagggtcctggtggtcccaagtccccctcatccgacgcatggcttctgatacagctgaagcaagtgatgtcctggctccgtctcaccctgccctcagtgtagtctcactaccacacaacccagcccaggcaaatttccagtttggattgttttcactgtctgcaggcattagagggtggttcacagctgagaggcagggaagattatactatgaagattcttctgtgacctgaacccaggtctttaccacagagctgagttgtcctggctacaaaccggaaggccacatctaccaggccacaccttcagcagtgcccagcattcacccctcatccacatccctcagaacctggaatcccaagaaaagggcagctgctggctagagtgcttttgttagattagaaaaaaatgataccggctgagtgcagtggctgctcatgcctgtaatcccagcactttgggaggctgaggtgggcagatcacctgaggtcaggagtttgagaccagcctggctaacatggtgaaactccatctctactaaaaatacaaaaattagccaggtgtggtggtgcatacctgtaattccagctatttgggagactgaggcaggagaatcacttgaactcgggaggcggaagttgcagtgagctgagattgcaccactgcactccagcctgggtgacagagtgaggctcagtctcaaaaaaaaaaaaaaaaaagaaaaaaatgatacctccagtgagaaatggctgcactgtgcggggactgtgtggtgatgtagactttcagctaatcacgagacacccattcctctgggcagtttcagtctctcatcagggtacatggctcaaaaaaacaagatgcactggaacttgcctccctggctaggctactatgcacagaccacacaaccatacatgcctgccctgccacagcaagggagatgggtcctctctcatgtcaggcctggccggagagaccacttctgtgcactccatttggaacagatgtcctgcccttcatctctccagggccttggccagatggggtttggtgcgaagcagctttggcccggtgttaattacctcctcttggagaaaggtctgcgcctggccctggctgttgggcttgatgcagcgaatgtagtggggcgtggtgctgtgtaggacctgcagaagctgctccagtgaggcctgcagatgagagaccatggggttaggcagggagaggggctgcccagggccatcaactgggctctggttagtaactacatcaaatgcctccagcgggcccttccatgatcctgagaccaagaatctcctgtgcagggatgactgctgcaggctctcaacgagcaggctcagagcacattcctctcccaacttcccatgctcctcacctctgtcttaagggacccttctaaacctgtgatcctccctgactgttctccctgaatccaatctcctcctctttcccctccccacttctccccagagcaatcttcttagaaaagaacaatctcaaaacttcttgccattcgtccagcaacaactgttatcactcagctcatcctgtgtgttggaggctgtgccacaggctgcctgctgccatgtcagagctcactccaatgggccacacatgttggatgaacaccctcgggggtgtgtttgaggctgggtaggaaggtgctaatcaaacctggttttccaggtgcctcctcgaggtggtggtgataaagctaaagtctgaaggatgagaaggactaaactaggaaaaggggcgtggaggatgggagtgaggtggagctgatggggcagtagtcaagagtatcccaggaaggtggggcggtacatgcaaggactgagaggtggtagaaagcagacgatgtgagagaagtgagtgagggtagggttagaacaggaagctagacagctggagatgagccaggtcaaagaagctcatgtagctgatcctcttcccatgagcaccccagtggcagggggtgagaggctgcatagtgcccccataggcccctagacttcccatcatattatacctgatagcctatttgtctactgtttctgtcttccacactgaagtataaactccaggggactgggaccacatctacttgacttgccactgctccccaacaaacagcaccgatcccggcaggtgctcaataaatatttgtgagaccgtggagtttgaaccaagcacctcccatcagcacatcagacccaccttgaacttggacaccacggtcaacacaggggccctgctctggccagggggttcctcctgggtcttctctttggggttagtaggaaacagccccatgagcagggggtcctgggattgctgcaggagcctggtcagctcaggtgggatagggtcctattgggaaatggcaagagcagcagtgagggcaggtggagcttctgctcagggccatccactgcccacccaagccgcagatgacggggcttccaggtaggacagggcctgagtccaagagaaggtccattggacaaccagagacctggagacccagtctaacatgggttatctccaggcaggtcatgcttgattagtggagacctcagacaggtgggcccaagatggtgattctggattctgggaggaggttcaggagagaaaggactcacgatgggaaactactatgtctgcatagcaaagacccagcatctcgtttctcgcaggccccacagggcatggcccagcccgtaccttgttcttctccaccaggcctgctgtgtggtaccgcacaggccccgcataatgcaccacaatgaagctgggctcccggctgagcttattgtggcccaggcaggggctgcctgccagggcagtctcaatgcgtgtctggagctgggctgcgctgctgggtcgattgaggcggcattcctgtgggatgggaacagggggtcagccaccaacatgagagtgtctcaccacaaccctcactgtccccaccctgtggaccccatgacagcagacatcacacaggcatcatagtgtccccaacagaaaaaatatagcaattagcagatctatttggcagactgggaggagagaggcacagagaggaaacaggataatcatcaaggccccagaaaacccaaaggccaactctggtgctcggctcattagctgacctccccacctcatttatgagggagcagatgctgatggggcttccctcaatgagatccaaacagggctggttgtcctggtagttgatgaatgaccactccaggccctcaactgcgtattcctcctaaagaacaaggtgggatgaggtgggagaaggcagctgtggtctgatgtcctgacgggccatccacggctggcctcggtaccacagcgtattccagaacagcatcaaagaaacaaaagtatatcaaaacattacattgtactccatatgtgcaattattatttgtcaattaaaaataaaataagaaggaacaaaaggcttctaatcagaacctggactggggctggaaggtcaggaagggattgaggatccaaaagaaggacctgcctcctgctcaccccatccctcacctgctgggcccttaggtagtgagccacaaaatgctgctgcagcttctcattggcgtagttgatgcacaactgttccagactgttgtcaggaaatgattcaaatccatacacatccagcaggcctgggaagatggcagagaacccatggggccactgcagggagcagatggggaataggggaccaaggaacccagggtggctgggcccctgccaatgccttatacttggcagcctgggcatcaggctgagtgagcatgacacctgtggtgggcagaacataccttccccaccctccacccaaggtggctcccatctctaccccattcccctgtagagctcagagcaagcaggaaacccaaatgaagtgtgaagacagcccagagcatcaggcccatttttgagtctgaattctctggttctgataggcacctcctatgaggaaaccaggtcccagggaacattttctgtgttaaatctagttcggagggcattagtctcactagccaatttggtgcctagaattccaccattccatgagcaaactgcacttgtacctttaagctttatttcctcctataactgactgtcccacctagttacaaccgtgttgacctccctcagtcatgtcccccaagtctttttttgttctcccccctgagatagggtcttgctctgttgaccaggctggagtgcagtggtgtgatcacagctcacagaagcttcaaactcttgggctaaagtgatcctcccacctcggtctcctgagtagctgggactacaggcatgtagcaccatgcctggctaatttctttgaaatggggtcttgctatattgcccaggctggtctccaactcctggcctccagtgatcctcccactttggcctcccaaaatgttgggattacaggtgtgagccacggtgccagcctccaaagtcccttctaatacagctattttccccaacccccactactctcccacaattagagctgggtctctggggaggtaaagggctctttcagacaaggcactgttgagcctgtctggagagttatggactgctcagatgtgggtgcaggagagcagagatctcaccctatgcagagatctcgctctatgctggcaggcagatgcaagaggagacaaaaaagggaaaggaactgcccagagtcacacagtggacccagggctcctgcctctccatccagggctttattgctctttttctggagtgctcccagcacagtgaggccttgctacctatgaaagtggtccacgagtcggtgtctgcacagatgctgctgttgatcactgataccagccagtcaaacaacctgttgggggaagagagtggactctggtaagagggtctggctgagtcaaaggggtggtaaaattgctccccccatcagggtgctacaccctggggggcccttgtattctgagcctgacaggtcaaagaccaaatcctctcctcttgcttccggcctatcacgtcttgacctactacagatgcaggctatgggcatgcatgttgccaggtacacacaaacctggcatgtccttatgggaagactgagcacaggacaagctcagctcctaggctggggagggaatcagtcgagctcagtcacatggctcgagacccagctagtgtcttgggaaggggcagatgggcctgggtgtggtttgtaaataactgagttcattgaacacccctgcaaaactctaccggtggagcccagagctcaaggccccaccataccccctgatgtagttctgcacaagtgggcccccagtcccgaggtcaacaatggcatcctccactctagaaccggccccagcccagagaagatgagactaccacacaagacgctgacacgtacagcactatacaggggtttcttcctcacattttttcttaaagtaattgctctgcaacttttttcccttcagtaaataaactggctctttttgcaacaggggctgtgcaaatgtcctgtggtcagaagctcactctatctgtgttcatcacactttatctgctcatcttggagtgacttgtaggcaaaggctttaaaagcctttgacctcaaattgtgacctgaaattagcttgaggcagtggtaactagtctcttgctgaaatggatttagtctggcctcagctgccctggaccattttcaactcggacgatctggttcccccagcagagcttctcaggctattggctctttgtggagtttatgaaagcaggggaccctctccccagaaaggtgcccaaggtctcatgtgcacatgcacacacatacactcattctggctcatctcagaggattctgggcccctgaagcccttacaaggcctgctgaagaatctcagaactcaaggtgagagatcatccttaaccacatggccagagggtggaggtacccacgtaatctaccagaaaaggccaggaccccaccttcaccactgtgctacatgctgtgggctgagcctctggctttaccacaatctatcaaactcctaggtgatgtacaaaggcacagggagacagagaggcccattcagccaaggatctgaagcaggaactgcgaaggctctagatcacctttggggcctgccttgccagcagacagctgagcaggttctcttcaccttgctgaggctaaagcagcctcctgaactttaataatgagctgaattctggccaggaatgtagcaactttcccactcagaaagaggccacagacgctgcttggtgaaacctgggagctgtgccctgatgtgtccaggggtttgaggagcagggagaggaaccagtctgtcttatctcccaccctgggcctgtgcctattgcctgatgttgtctggcccaaccccggacaggaagagcacttgtcggggtcctccccaacaaggggccagagtaactgctcaccgcgcatagatcagtttggccaggcagtctctacgggtgtcacactcggctcgggcgcagggcttccggaacacctgctgctgtctgcctgccctgatggttctaatctgcaccatctccagcagcacgtcctctgggagccccagcagcgaggctgccgtcctgacagagtctgggaggggcaaatcctctttaggcaaatcactctccatccagtcctcttcacgaggcactgtgaagtcatcacagcgggaccatgacttgcccaactggacagaagaaacctaagttctgatcagtgaagtgactcacccaaaggactccataaacagcagtcagaactcaaacccagcactttcatgtaccagtccatgctgccatgtatgggacaaatcactttacaaacctctgactcattttctcatctttaagatggggacgatactgtctgcctcaccagacagggtgaggagtaaatgatccagggccaggccctatggtgggtggcataagcaagggcatcagattccaattttcaccatccagccttccacccaaccccagcaatgctggctaccttcctgacagggcctgccccatcctacaccctgaccctcacacttggcatcatccatcggctggcagggctgggcttcatcctcggaggcagcaaactggatattgccaaggtgcagcagtccagctaggacctgggggaaagaaaaggatgggtgggagtaggagagggcgtgacgtgggcctactctgggaagggccgttctgctgagtacaatcacgacagcagaagggcagctcccaatcatggcccaagtgcccatctctgccagacacaattctatacaagttacatgcatcgcctcattgcaacttttcaacaacctgtaaggtatgtgctacgccactgcctatgatagagatgagactgaggacacgtgcttcctgaggggaaaggtgggatgagaacccaggctgacttcagatgtctcctggggcagcctgtgggcctccatgcccacccatcctctacatttctgccccctgctctctaggaatagactggtgactgggggcagggctgcttctgtgtgcctgctggaggcttgtctctgcttccttgagccctttcccactgtcaggcttctgagagcccagcctgctggaggcactgtgaccttggtctgtgtccgatgggtgcccctttgcctttgtactcaatgttccacaccgacaagccccctggggctatagacagaagctcccctcaccccaccaaggcccagcaacttcaaaaccctcagacccagctaggcatggtggcacacgcttgtaattccagcactctgggaggctgaggcaggtggatcacttgaagtcagaagtttaagaccagcctgaccaatatggtgaacctccatctctactaaaaataaacacacacacacacacacacacacacacacacacacacacaaaattagctgggtgtggtggcacatgcctgtaatcccagctactcggaggctgaggtaggagaatcacttgaacccgggaagaggaggttgcagtgagctgagattgtgccactgcactctagactgggcaactagagtaaaactccatctcaaaaaaaaaaaaaaaaaagaaaaaaccaccaccctcagacctgacacagggaccccacccaccattcctatatggtcccaggcagggtgcctccatgtgctactggtcttccggccacaacttgctccagaagactgccatgcccaccaggcagaagggctgtggcagagggtcatgcccacccccaaagcactcctgccccgactcccagtgttgtccacttatcctgggcttgtccccaggtactgtccttctgtcaagttcttacctggcagtgtctgagcagcccccatctggaggtgagggtcactttccactgcattgctacctccctgaagtggcctccctttctcgactgccaggccatcctatctatcccctcctgctgctctagagggtgaggaagatgagaggaggtagtcagctctgtcagcaaagacagaagggaggcccccctagtgtgactgagaggagcccagctcacctggggcagtctcatgttccagaggacgacggggcacgggttgggggaagacagagagggtaggaacttggaattactatgtctggtactctgtatcaccacttagtggtatctgaccttgggcacgtcactttacctctctggttttctcaggcataaagggaaataaacacacacagaggactgtttaaaaaactaagtgagcagagaagtgtgaacatgacttgtaagttttaatgtactagacaagcaaggcggtagcactagttctctcttctgatcatgcggtaccttgctctctgcccccatggatcacttactgcattctgtactctagcactgtgtatgcatcactcttccttatgccccgtccaccccaccacctggtctccagactcagcagaacagaggtgactgattccttggaggtagcacagaagggcccaaagtcctagatcctcagggaaagaccaactccaagtccagggaaaagctctatgcaaagggctgcccgtcatctctgccaaacttaagtggcgtggcttttcttctgaccttaaagatgttgttctgggtaggggtgtcaatgcccaaatggagcatggcctctctggtcacctcaaaacaatcctctgaaaaagaatccaagttcggggcagaggtcagcagcagcaagatgcgagggaggcaggctctgtacagagtgggtgggtgatgctgggtcagcgcaaggtgctggatggggctccccttaccttctaagctcctctctgggttgggcagccaggagaaggcagctccctcaggaaggtgccactggagcctctcgtcctcactggctcctttgcaaatctgtggagaagggtaggtgggaggctgggtagggggtctgagaaaagcccaggcctgcataggcaggcatggggttgggataagaggagagttggtagcaacatcacaaggctcagaggtcccttccgagagcccacggcaggtatgggggcaaaagatgccgtaaacatagccctggatgtctccaacctgatgcaaaagaaccttgctctagggaaacctgcagtctggtgaaaaaaggacaactcctgcccagggagtccgtcgtcttgacgtgggaggcatacccatcacctaaggatgctccgattttgagagaaagggagatatcctatccatgccttgggggactcccagtccgatggaaaaggcacaactctagggaagcccttgttctgttagcgacagatgccattctaggagagcccttaaaatgataagagtgacacggcttccaccctagagatacagtcccagcctcaaggaccttctggtctgatggaggaggtaaaacatactcccaggccacaactgtgctgggagccaaggcgcagtgtgaggcagaagtgctgcatgtaaagtctgcaggataaagtggtggctccatcaaaagctaggtgaaggaaccaggtatggagcattctggggagtggggggttgaaaaacacggacccatccctgtctcgcatctggggggctgtggccccatttggcacaaacctgatagaagatgtggaagttcctctcactggaagcctggcaggccactcgagttttctctaggaggtaggtctggactgcggctccagtcatttgctgagccctgggacacacacaggccagagcccgttagttgcccattcattccatagccatgtctggcaatctgggtgtgccagattgcctgctacctggcaactccccgccaagctcttccacttagccaatgggcactgaggggtggggaccactcagaatgtccttgggtgtcctggaatattcccctgcatctagctcaggtgggcagggccaaggcctctgcacatcactttgctctaccccaagacaggagtcgaagtctcagcctcaagctcagggatatggtccaaagaggtggcaatttagcttgaagtccctgagcaagagtaaaagccaggaggaacccaggcctgaataagcgcactgccccagggttccccaaggggagaggagctatagttctccaggtgcaaagatcaccctcagagctcacacctgaggtaaagggcatgcaccaggaggagcagggtttttgcccataggggtggcccaggccagatactgccccagccactttcaacctccccagtcccatcctcccactagccagggcaacagcagctattacctgttcagctggagctggatgaacttcccaaagcgactgctgttgttattcctcagtgtacacgcattccctacagatcacacctatgtttatttcactcccctgggtttgcagagtcctcataagccaaggtggctgcaggtctctggaggtcatgttcccgtgctcaagtcacctaaaggcccctttgttggttttcatgtcataggggacaggactagaaaatgggccctcatgctttagcaagtgggattcaggggagttagaagaaattcctggcaagaaattggaatgagcaagcctaggcagtcagggacctttctttgaagggaaaggtcaaaaacaatcagctgtcactactgactttagacaggaaggcacatctgggttccagtgccaacacaaacactaatcaccttgtatcccttaacaagtacccttcattgaaccatcaggaaactggatagaaagacagaatttggacgagctaagccaccaggtcttctccagcacgactgttatgtgtgcctaggctggagcgaggaagaggactgaatgacatgacctctgttagaatgatgctaaggagtaccagggagaggttggggatctgaggcagtgaaggatacactcatcctccacccccacccaagagagggtctcaaagcactgtccctctccctggaaggtggaaaatcccagaggaaatgggactgagatactgtgcaaaggagcccaagctcaccaaaagcttccatgacagggttggagttcaggatcctctgttctatcctctctgcaatcttgtggctctcccaagatgcaggtgaggtggccaccacagcatagaacttcattaggcagcgagacgtccatgtctgtggcagaaacagccctgtgggagctgtatctatgctcccgcccacttctgagcctgcctgagagaacagtgcccaccagagctctcttctccaccagtgtgttgctgacaaaatgggtgaaggcagaattcaaccctggcctcaggcaaggcacttcctctacctctgtttgtaaaatgggagtagacatctgtttctctcagctctgtggcagacactgagctatcgaggctttctgtgtatgttttttttgcaaactctgcaaaggtgtgattatacaattgtttataaacaataaaaccaaagcatagaaatttaaaaatttattaaaaatcatgcatctactcaatgacagggctcccatttatacccaagcagtctaactttttttttccgagacggagtctcatcttgcctcccaggctggagtgcaatggcacaatctcaactctctgcaacctctgcctcctgagttcaagcgattctcctgcctcagcctcccaagtagctaggattacaggcgcacgccaccacgcctggctaattttttacatctttagtaaagacggggtttcaccatgttggtgagtctggtcttgagctcctgacctcgtaatctgcccaccttggcctcccaaagtgggattacaggtgtgagccaccgcacctggccccaagcagtctaattttaattcatactcttgttcttaatcagctgaagtgaggtatactttcattttaacttctaattgtttgtggctaggacatagaaatacactgtctttacatattgaccttgtatcctatcacctcactaaacgctctacaactttttagttgcagtaaggtggcaacttactttgtagattctttagatttttctttgggatcagagatatttctatcttctgaaagactttatgtagaactggtaacatttcttccttaaatgtttggtagaattcacaagtgaagccaccagggcctacagctttctctgtgggagggcttttaactatgacttcaatttctttcagaaataggggctattcaggttctttttcttcttgtgtgatcttcagcagtttgcgtttctcaaaatatttctccatttcatctaaattgtataatttcttggcataaagttattcaaaatattatcttaatctgtaagatctatattgatgtctactccttcattcctgatactggtgatttacatcttttttctctttttataagtctgactggagagttatcatttttttgtttgtttgtcttctttagaggcaaagtcttgctgtcacccaggatggagtgcagtggcacgatctcggctcactgcaacctctgcctccggggttcaagtgattctcctgcctcagcctcctgaggagctgggactacaggcgctcgccaccatgcccagctaatttttgtatttttagtagagacgggctttcaccatgttggtcaggctggtctctaacttctgacctcaggtgatccacccaccttggcctcccaaagtgctggattacaggcgtgagccactgcacccagtgagttatcattttattcatcttttcagagaaaagtcttttatttcattaatttttctattttattcatctttactttttcccttcttctgcatactttgggtttattctgttcccctctagcttcttaaggtatgccacagactgaattgtgttcccctcaaattcatattttgaagccctcactcccaatgtgactgcatttggagaagggatcttcgggaggtaattaagattaaataaggtaatgacgccaggtgcggtggctcacgcctgtaatcccagcactttgggaggctgaggtgggtggattgcctgagttcagcagttcaaaaccagccttgaccaacatggtgaaaccctgtctctactaaaaatacaaaacttatctgggtgtcatggcatccacctgtaattccagctactagggagactgaggcaggagaatcgcttgaacccgggaggcgcaggttgcagtgagctgagctcgcaccgttgcactccagcctgggcaacaatagcgaaactatctcaaaaaaaaaaaaaaagaggtaatgaagatgttgtgctttcattttaatttattagttcaaaatattttctaataccgacttggtaatgaaatttcagacaaggctggacacagtggctcacgcctggaatcccagcaatttgggaagctgaggcgagctgatcacttgaggccaggagtttgataccagcctggccaccatagtgaaactataacgtctctactaaaaatacatagtctctactaaaaatacaaaaattagccaggtgtggtggcatgcacctgtaatcccagctactcagaaggctgaggcaaatgaatcacttgaacccaggaggtggaggttgcagtgagctgagatcacaccactgtactccagcctgggccagaggatctcagaggaaaaaaaaaaaaaaaaaaaaaaaaaaaaaaaaaaaaaaatatatatatatatatatatatatatgtgtatgtgtatatatatgtatatacataaaagtatgtatatatatataaaagtatgtatatatatgtctccttagaagataatcactaaggcaaaaatggtaacaatgtttatatgacagcatagcatcattaaaatgctgaatttaatcaaaggcaataaaaaaaggaactaagatcacacggaacaatttaaaaaataagatggtagatttaaacccaggcatagtgagatagatagatagacagatagatagattttttttctttatagtatcattgtgattttatcttttacccataggatatttagaagtgcattgtttaatttcccaatgttttaggattttctaggtgtctttgttgtttatttctaattcaattctattcagctcaaggaacatagtttgtatcattttaatctttttgttttttgtttttagacagagtcttgcttgctctgtgtgagtaaactgggactacaggcacaagccaccacgcttggctaatttttgtatttttttgtagatatgggttttccccacatttcccaggctggtcttgaacttaagcaatccatcagccttggcctcccaaagtgctgggattacaggtgtgaaccattgtgcctggcctcaaaatgtagttttgattttatatatttttcctttcaatgagagcagattttacttcatgtattttgaaactgtaattaggtacacacctgtttagaactgttttcttgatgaattcacccatttatcattatgaaatgtctcatcttatccttagcaacattgcttgttctaatgtaaccacttcagctttcctttatgaatgttaggatgttatattttttcccatccatttagtttgaacttatccacgagtagaccacttatatttatcgtaattgtcactatgcctgggtttaaatctaccatcttatttttttaaattgtcccatgtgatcttagttcccttttttcttattgcctttgattaaatttggcattttaatgattccattctatcatataagcattgttaccatttgtgccttatagtgattatcttctaaagagacaaaaaaaaaaaaaagattttacatctgtgatgctgaaacttacccctttgtgtagatccaaatatttatctggttttcatattcttttgcactaaagaatttatcacttcttgcagtgcaagtctgcaggcaatgaattccctcaacttctatttgtcttaaagtctttatttcactttcattgttgaaaaatatttttgctgataacagaattctaagttgacagatttttttctttcagcaccttaaaggtgtcacttttatctgtgggcttacagtttttgtcaagattcctatggtcattcttatctttgttcatttttatgtaatatttattttcctggcttcctttaagatactttttttccttttttttgagacagagtttcactctgtcatgatcttggctcactacaacttcctcctcctgggttcaagcaattctcccacctcagctcccaagtagctgggatttcaggcacctaccaccatgccctgctaattttttgtatttttaatagagacgggatttcaccatgttacccagactggtctcaaactcctgacctcaaatgatctgcctgcctcagcctcccaaagtgctgggattacaggcgtgaactactgcacctggtccttaagatttttttcttatatttagttttcagcactttgaccataatgtgcctaaatgtgttttctttgtattcattctacttggcaatttttgagctttttggatctgtgcttgccatctttggttaattttgtaaaaatattacttttgacccatgtcctctctctactcctaggacaccaattacaagtacagttgacccttgaaaacacgtgtttgaattgcatgggtccacttatacgtgggttttttttcaataaatctctcctgcctccccttctattatacttccactacctctgccacctctgagacagcaagaccaagcaagactgtcctcttcttcctcagcctactcaaagtgaagatgacagtgatgaagacctttatgaggatccactttcacttaagtagtaaatatatttcttccttctgactttcttaatttcatttctctagcttattttattggaagaatacagtatataagacatataacacacaaaatacgtactgactgttatgttatttgtcaggtttccagtcaacagtagttaatcagcagttaaattatatgcagattttcaattgcgtggggagttggtgcccctaacctctgcattgttcaatggcagaccatttgatattgtactacagttcttggatgcaattttctttgtttttcaatttggataatttctattcaccaacagttaagttcactaatgcattcttttgcatgtctagtctgttgatatgcccaaagatttatcatgttttaaatttttatcatctccatttgattctttatagtttccacctatctgctgaaagactggaggaatcttttctggagacaccaataagctcacgggaaaagttatggccattcagggatcccacaagtttaaaaagctacttacagtgaggccccattggttgacaatcttgtacgtaaacacagattctaatcagttgtttaatgccttattttaaatatgaacagacactctaggatcattatttcataagcctcttttacgtgaaatgacaaatatcataaatgttagaaaaaaactagaatgtagaattaaaatttttaacaaatattcgaagttccaaagaattggaaggtaaagaaaagaatatctctcagaagattaaaaaaataaagagaaaggaggataggtgagaaaaacatgattacacaactaaccaaatttcctcacagaagttccagaaggagaaaacaggggaggaaattattagatataacacaaaaatactttcctgaacaaaaggacatgagtttccaagttaaaaagacccacacaaagtacccagcataataagtgaagaaaggctataccacaacacagcactgtgaattttaatacctaaaacctttgggggaaaaaagaaatcaccattatggactggctctctcaacagcaatatatgaaaataaaacctcggccaggcacagtggctcatacctgtaatcccagcactttgggaggccggggagggtggatcacgaggtcaagagatcgagatcatcttggccaacatggtgaaaccccatctctactaaaaatacaaaaattagctgggtgtggtggtgcatgctggtagttccagctacttgggaagctgaggcaggagaattgcttgaacccgggaggcggaggttgcagtgagccaagattgtgccactgcactccagcctggcaacagagcaagactgtctttaaaaaaaaaaaaaaaaaaagaaaagaaaaagaaaaaagaaaataaagtctctatattcagaaagaaaattatttctaacctggaattataaaacccagccaaaatatccatcagatttgaggcagaatagacattttcagatgtgcaacaatttgccctccaggtaccttgttcaggaaaccactaaagaatatggtttggccgggcgtggtggctcacgcctgtaatcccagcactttgggaggccgaggcaggtggatcacgaagtcaggagttcaagaccagcctggccaagatgatgaaactccgtctctactaaaaatacaaaaattagccgggcctggtggcaggcgcctgtaatcccagctactcgggaggaggctgaggcagagaactgcttgaacccaggaggcggaggttgcagtgagccgagatcacaccacctgcactccagcctaggcgacagtgcgagacttggtcaaaaaaaagaaaaaaaaaaatagaatatggttcataaaaacaaaacaaggcagtaaatgaagaaaaagaaagccatggagactaggcgtggtggctcatgcctgtaaacccagcactttgggaggccaacgcgggaagatcacttgaggccaggagttcaagaccagcctggccaacttggtgaaaccccactctactaaaaatataaaacttagcaggtcaggcgtgatggctcacgcctgtaatcccagcaatctgggaggccgaggcgagtggatcacgaggtcaggagatcgagaccatcctggctaacacagtgaaacccgtctctactaaaaatacaaaaaattagccaggcgtagtggcgggcgcctgtagtcccagctactcgggaggctgaggcaggagaatggtgtgaacccgggaggcagaagttgcagtgagccaagattgtgccactgcactccagcctgggcaacagagcaagactccgtctcaaaaaaaaaaacaaaaaacaaaaaaaaaaaactttgctgagtgtggtggtatgcatctgtaatcccagctactcgggaggctgaggcatgagaattattggaactggggaggcggaggctgcagtgggctgagattgtgccactgcactccagcctgggcaacagaaaccctgtctcaaaaaaaaaaaaaaaaaaacaaaaacaaaataaagagaacgctatgggttcctgccatgggggatttatcctaggacagatgggaatctggggatgtgcagaagcaaagaagcttccatgcaacagctgtgtggcagcagccctcagcaggcaccaatccagacagaagaaaagatatggtctgagagctctaggaagggtatctccaatgaaagaagctgatttgcttgccagtttgacaggtgttttccagatttggtgacaagtctggtaatgagttaataatggtatataaaaactaaacaagtgaaaaaatggggcaattatttatttattatttattttacttgccccactttttcactggtttagtttttgtacaccactattaaacagggaaaacagagggaaaataaaaattatgcaagaatatatagtatattatatggctctgctatgcatatacacatgaccataaccatgtaaatactgcttattaacttaattagaaattatgaaataattatatacagaatatgtattttgagggcagggaaataagggttaaatcctcatcaaagtaggaagtgaacagataaggtccaaaaccaaaaagtcagtaacaacataagcagtagtttaaaaatacggatgtaaacacccaaataaactgataaaagatgtgcaagtaactgcatctggagacagggaacaaggttgaaagacaaggagcaggtttgctgtttttctttataagccttgtagtattgcttgattttttgaactatgtaactacattactatttattaaaaataaatttttgaaaatataccaggcccagcccagggctacagtggctgctcaataaagggttacctagctctctggttgaatgagtcttggaccaggttcagcttcagttccccagagcaattctgggggacaaggcttcgttgagaagctgggcataagccacttcactagccaccttgatatagctcctagagatcccctcctaacccaagtccaagccctcatccctgcaacttactgtctttgttttcttatctgtctctcagcagactaagtgccccctgaaagctacatgttgcatttttcatccccctgccacccctcagtgcccagccagaagcctagaacctggcaagttctcagtgttcagcaattctcatatgtgagtgaaggcagaaggagtttatggtccaaagagttcctcatgaaggtaaaagtgttgtggaaagggcgaggcagctgggtgaggcttgtcaagaaggtggcaaggccttggccaatagtctcctttgactagctgtgcaactccccactcatctgtatgcaacatcctgtctcacctgttgtggttttgctacccagaaggccacgtggccataccaggagcttctgtcctccccaacacctggcccaatatactgcccttgccaccatgcgcaacccagagggttcaggtggtttactccaataaactttttcccacaagaaccccagctactttggaggagcactgccacatgccaagcatgccaccaggtgccatatgtacagtgactcatttaactctcacagaagtcctatgagtcaggtgttggtcctcccttcccttccattttacaagtggaagaactgagagctttgcagaagctacgtacttttctgatgtgttcttaaccactatgctggaatccccagcagctgacttttgtttccagtagtgtcaagagctgggagacactttcgatgagaaaataaggcttagaaaggaaacttcattcctatttcacccagggtgatggcagagcttgcagtagagcctggactggtatcctgtctcttgacttccggctcagtgctagcccaccattgtgcaccaaccccagcttcagccagcctatgtgggaatgattaggaagcaaacaactccacaaggaaggccaaggaatgacccctgcctccctgtccacccagccagtcgtgagttgacaggatgggaaagacgtcttcctacctttccagcaccactctctccactgacaacaatagactggttgactggttcaatcaggctcttgacattcctgtaggtctgttcacccacagtgaacacatggggcttcagtttctggaacatcaaggagtgaaaggtcatgtgagggaatgcctgtttttcaatgatgactgagccaatgatgactgagatggggaggctgccaatagcagtggtgggatgcttcctccagaaaaattttctggatgtcacattgttaggcccaactttagaacccctatgttggctttacctattcattttctctcagcctagaagcagggctagccttgaccagtttatgacattaacactttatacccccatcttatcttgctttaattgtcttatccttctgcctattacttcatattactataatttgcaatttgcaaagttcgtataaactactaagaagcctgtccactaattggaaatataaccctattttatagataaggaatgtgaggttcagaggagttaaataaccttgcaaggccactcagcaagtaagtatatccatgtgatttaaattccaaagccactgttccccttttcttcaacaactattaactgtcttcaatgtactaggcatcaatcaagctggatgctgaggaaacataggggactacgacttggcttttacttttccggaggcagggcagacagcagacagggctctcaggacagactgcccctggattccaactggatacctcatcacgcatgaacttctggagggccacgccatctccacaatgcctagctaacccagccagcagtgatcacttacccacagcttgctgagggagaaggcaactgttccatatggcgtcagagccactcctctctacacctgcccttgccccagccacctatcacctggagggatacaaagcctccaactgttgtctctgcctcctgcctcaccttcttgaacccaactcccacagtaattattcgtctagtgggttctgttcccagtcccacctctacctggatgaagatgctctgcagattctctctgcctgctatggtgcttcagactcttcacaaacaaccctggctttctcgtcttcctgctctcatctactccctcttgcccccaagacctccctcctgccagcaagttttctctcacctctccctgaatgcatcatgcacttttacaccaacaagctcattatctgtctgtacctccaccaccccaccccaaataacttatccttttctcagtaaaagaataagttactttcctcagcagagataaacatatgctgaattttccagggcaatccttatcgtgtataatttcattctttcctaaaaaggtagttttgctggactcagtggctcatgcctataatctcagcactttgggaggctacggcaggtggatcacttgaggtcaggagttcgagaccagcctggccaacatggtgaaaccccatctctactaaaaatacaaaaattagccgggcatggtggtgggcacctgtagtcccagctactcgggaggctgaggcacaagaatcacttgaaccctggaggcggaggttgcggtgagtcaagatcgcactactgcgctccagcctgggtgacagggagagactcagtctcaaaataaatagggccgggtacagtggctcacacctgtaattccagcgctttgggaggccaaggtgggtagatcacctgatgtcaggagtttgagaccagcctgaccaatatgcctactaaaaatacaaaattagccaggtgtggtggcatatgcctgtaatcccagctactcaggaggctgaagcaggagaattgcttgaactcaggaggtggaggttgcgctgagcccagatcatgccattgcactccagtctgggcaataagactgaaactccatctcaaaataaataaataaataaataaataataataaaaaataaaaaggtagtttgttaaataaacaaatatataatacctttataaatcctttcctgttaataaaaccgcaaacaagaaaaaaaaatcctttctcttatgtctcttattttaggttccaaactcagttaaacaaatatttatttattccccactttgcaccttctgtcctgtagtcagttcttcatggttcaaaattctgccagctcctattgggcaggccgtggcactagcagactctgaatgaccacattgctggtgaatagatgaataaggacaggggtaactgcaaagaggtttagcgggaggtagaggagccctgaggccacaggcagcggcagagccttacctggggctgaggcgcagcatggtactctctcattagctcgggcgagtagagctgaggaacaggcttgaaggggttcaaggctaccagggtgcagccagcattggtgtagaatgtgtctgccatgtaccgggcctgcaggcacctcaggactgaggcagagatgcctttagcaaactcgggctcaaatatagtcaaaccacacacacagacacacatctacttaagtaacagccctctttctgcaattagccaagaatcattaaatcccagcagctccctgaagaaaagatacaagatctaattaagatgagctccaaatctgaagcaaagcatgccctggggagcccaggtgcagctgtcatgctccctcaggcggaggtctggagcagcccacctggctccagatcaggagtcctgccgacctccgtctgacctggagaagctgtgctgactactctcattacacctccaacctcctggagatgatactcctgaggaatgggaggcccatacctgtctctagtgtcacaggattcaccctggtgaggtcatccagtttgtacagcaggacctccccacccaggaactcctgcaggtcttctctgaggtactccctggcttggccatcagaccccggattgtggccattgacctggaagagataacgtgaaggtgaggccaggcacagtggctcatgcctataatcccagcactctgggaggccaaggcgggcaggacacaaagtgaggagatcgagaccatcctggttaacacggtgaaaccccgtctctactaaaaaaaattcaaaaaattagccaggcatggtggcgggcacctgtagtcccagctactcggaaggctgaggcaggagaatggcgtgaacccgggaggcggagcttgcagtgagccaacattgtgctactgcactccagcctgggcgacagagcaagactctgtctcaaaaaaaaaaaaaaccaaaaaacatgaaggccgcgacagctggtactcaaaacagctggcagctacagaagggtgggaacctgtatagtagaaggagactctggtatcatagtctggttgggttcaaatttcagttctgcctcttagtagccctgtgagcctgggtaagttaccctctttgagtcacagtttgtttattcgtaaataaaggaaaataaactcaactgacaaggttattgggaagaaaagaagagatatacaaagcatttagtcagtgcccggcatacagcatgtactcaacaaatgctatctcttctgccaagagctccggccacttgcaagtagcacttccaggctactagccttattagaaataaggctataggaatgttgcaaaggaaaagaaccatgggttaggcctttttgggaagagacagttcagcttttgatgtaaaacagctgtaccttctgagagaggtagccccatgtcttcatcacctgccttttgtggcttaaatttaggctggctaatgaattggttcccttggcccgagtctgcttgagagaaagcctggctcagacggctgtctgaggtcaagaataagcaccaagggaacaggtcctttctcctcccttgcctatcttttttttttcctttcttttttaagagatggagtcttgctctgctacccaggctgcagtgcagtggcatgatcatatctcactgcagcctccaactcctgagctcaagtgatccttctgcctcagcttcctgagtaattgggactagaggcatgagtcaccctatcttcctttgcccattcttgatgtatcatccctccacttcctcctgtggtcccatttctcctactgtctcctttggggatgcaggaaagacagagtgggggttgaagacaggtatcttgctgaaatgtgcttttgaaggaagaggtctgtgatacaacaggtgaatttccaatgagaatggtgagcctaaaatttcaaatctctcatagaaataagccatggtggcaaatttcctccaagaggcccagtaatgcatttcttccaaaactgttgcctgttctctgaactttgggcccactataatgcacaaggtaggctcttggcctccagagtaactgcggaggtcagagcacagctatatctatgcatatccctctccttttatgaaggggaaaaaaaaaccaccactacacaaaccattcacaaacacagacacaatttatgaagagttctgatccaaccagagaggcatctgagtatagtgatcaagtacctggacttgaaagttagttgtctggctctgaatcctgactctatctcttacagttatatactcttatgttaatttcttaatctctttctgcctcaattctcctcatctggtccctgtaatcccagctacttgggaggcttaggtagaagaaccacttgggcctaaaagttcgaggctgcaatgagttatgattgtaccgctgcactctagcctggccaacagagcaagaccttgtctctaaagtaaaaaataaaaatagaaaaatttccagctggccatagtggcttaagcctgtaatcccagcacttagggaggccaaggtgaccctgtctctataaaaaatatttaaaaattagctgggcattatggcatgtgcctgtaaccccagctattctagaggctgaggcaggagggttgcttcagcccaggaggtcgaggctacagtgagctatggggatatcactgcactgggcaacaaagtgagaccctgtctctaaataattatttaaagttcttttctgtaaaatgggataatggtacctacctcacagatactcacaagcacaaaaacacacgaaggatttagaaaggccatctggaatctgccaaaaggggttagctattcttcttctaaaagtggctttttttttttttttttttttttgagacggagtttcgctctgtcgcccaggctggagtgcagtggcgcgatctcgactcactgcaagctccgcctcccgggttcacgccattctcctgcctcagcctcctgtgtagctgggactacaggcacgcgtaaaagtggcttttgtatttttttttttttttgacacagagtctcgctctatcgcccaggctggagtgcagtggcacaatctcggctcactgcaaccactgtctcccaggttcaagtgattctcatgcctcagccacccaagtaactgggatcacaggcatgcaccaccatacctggctagtttttgtatttttagtagaaatggggttttgccatgttggccagactggtcttgaactcctggcctcaggtgatctgcccgcctcgacctcccaaagtattgggattacaggcatgagccaccgtgcctggccttatttatttatttatttaagagacagggtctcacggctgggtgcggtggctcacccctgtaaaagcactttgggaggctgaggcagacggatcacttgaggtcaggagtttgagaccagccttgtctacagagtgagactccatctctaaaataaaaataaataaacaaaaattattaaaaaaaatttggaggctgggcgcggtggctcacgcctgtagtcccagcactttgggaggccgaggtgggtggatcacgaggtcaggagatcgagaccatcctggctaacacggtgaaaccccatctctactaaaaaatacaaaaaattagccaggcgtggtggccagcaccagtagtcccaactactcgggaggctgaggcaggagaatagcatgaacctgggaggcagagattgcagtgagccaagatcaagccactacactccagcctggatgacagggtgagactccatctcaaaaaaaaaaaaaaaaaaaaaattggaaaatagagataagcaaaaggagcataaaaatccataatcatactacccagaaataaccaatattttagagaatatcataggttttttcccctacatactttaaaaacattgaaaagtattatatttttgtgtaacttgctttattccattgtattgatataccttttttttaataagagaaaaaaaaagtttaaaaataagcaagaaaaaagcccagagcagtcaactgttttgcccacttcttaccttcaaacctgttccaggagccatatggctggaaggtcaagctgcagtgtctactatggctcccttgatgctggcaggccccacacctggctgctaccttgctgatgtcaggcacttacctacccaagactccactagactctgagctccttgagggcaagcaccaacctcaacatctgcctcagcccagtgcctggcaacacttggtaaaataaaaagtcagcaaataagtactggcactctctcaggaccaagagttacacatgaaggatgatatgggtatgagagagagctccgctgtaaaaggtgatttggaatcctacaggcctggggcaacagtagccttttcagagaggcagagacatggggatcatgtaacccatgatccactcattagaatccttctatatttcctcatagtctcctacatttctgcacaggctgacctctttgcctggagtgcttattttccttctccaagtggctaattctttctagttctttaaggcttagcttcaaggaacacatcctcttggaagccccaggcttctactatgcctcaacaattcaggtggcagggacatctctcaggacttcctctgcagaatccccaaagtgccctaaggattcccttacccatcccaccttacctatcccaaagaaaggagctaaaaaccacaagacagattcaaattaggtatcaggaagagtttcttgatgatgagtaaaaggcactggagagacaatttgaggagagaaaagagacctttaagggggctttcccttccttccaggttagggctagcaacagatgctgcaggtgcttgagggcctgggttatctaaggttgaggttttacctgctggagcatcctccttcaaagtggtcagccagggttctgggttgcaggaggtacaaggagtactatccacctagtcatgggaccatgggctggggtatggttccaacaaagggctcagttctggaggaatctcagacaagtcactccagcgcctgtggcatgagagagaagacaaggaccacacacaggtgagggcttttctggagtgactcactcactccttcccacctagcagaagcaaccaaaatgagatgcaaggcaggcctgggcggagagtgggcctgtcctttcccttgccaattaggagacagggaaacttttatgagagcctcagaggctccctgggccagttttattacagggttagggtttgggttggggtggggctgcaaaccctctgggtcagtgtgccatggaggaggagtaagacactggggagacagagaagccttgtgccctatcctctacattagacagaaatatcctatttcagtcgttggtgaggaggagaggctggagtcatctctcgctgctccaggaaaggtgtggtgtggtagtttatatcacagttcaatcactcactgggtgtgtgatcctgggtcaggcacatcacctacctcaatttcttaccttgaaaatggggacagttaaatctgcctcataaggagtggttgtgaaggtcaatgaggtcatggtttgacagcaccacacaaagtacgaatctgagtattcactcagaggataaacactgttagcactacgactaagggttgatgatccatttgggagcgctaatcaggtgaacggtccagtgtcaacttcaagaaggtgaggatttcagggagatgaatccatctgggaggtggggtgttgtgaggctgggcctaagccaatctttgaagaatggttaagtgaccctcagacttggaattttctaggccttggcaccacccctagcaaggagagatgaggctgagggtgaagcgtgcctgcaatggattaaccctggtggagactttcttgaggctctgaatacatcaagtctttaaagaacccagggatagggacttccatagaagctggaaaaaggacaattgaggcggaaacaggtatcaggaccgtgctggaccacttaaggtgtggtgctacagccctaaaagatcctgaccctggacactgactgtaccccatccaagggacagccatgcagagggctccagagaacaaagctctttcaactgggaactcatctcaagcaataggtccagaggggcagcacaacaggtttggggtttgaatccaaaacccaaggcccctggcacagaacccaagaactaagcctcactctgtttcctcgtttacaaaacggagtgataatatccagatctcacggggctaaatgaagcgttaaaggggctaatacctgtgaaagcgctctgcaaatgttattacgatgcagcatcagctcctagctggagtcaagtgagattagagcagttttctccagttctcccagctcctgctccagtcggtttcgcggttaccagccaagaatttctggaaagggtgtgaacactgtgggcagaaaggagacggtaatgagtaaatggaacaccgaatcaaggcaagtggcaacctgatcaccagtccctccttctcagactgtttctttctaggcatggaggacagtgggagggcagacgctgagaagcgctgggtaaggatctcatcagtccagctggctccgcccccaggttcccggcgggaaccggggactcaaggtccgggcgtcgtgccgcaaacccagggctgggatgccgttccggaagcacctggcacggggagagtatgtccttcccaggaaggtggacgtgaccccagccaagggcgcagctgccctgacacctcccgggaccagccgccccctcccggggtcctcagctgggcgaagagtggagcaaggaccctctccccccaggccgccccctgccggccaggtggaaaggtggagggtgatcaagaaagacttgtttcaagcaagagccaagagctgggctaccccctcgtgagacacaagagggtcaaaaggaaaaggcaaaaaggagggaaacggcgctttggaaggggaggtggagacgcctacttcttcctcaccgctgcggggcaaactggcctcccaagccccttccgcgtctgaagggcttcagatataggttcgggttgacactcaccggtcccacggcccgagccgccgtgcttcaggcccccgcccggccagactggaaaggcgggcgggccaggtcaggcggcgggaagaacacgggcaggagagaaaagaggaggggcaagagcgtgcagtgaggaaaggaacctgggagcgccgaaccgcaccccgtcggctgcggcactgctaagtggccgggggtcggccggctcctccctaggggcggggcgagcactcgcggcgcggggcgcgcacgtggcttggccgggacgcctggtccggcttgctggcttcaactacggtgagatgttttgcgaccctggggtaaaatgagggtaaagcggcagcttcccacgttctgggggagaagcgcggaagcacggtttcctgggccttcgggcgacaccaggactgggggtctttcagtagaggtcgccgcggcggagtcttgtgcgagtgcggcggagtgttgtgcgaggccggcggacaccattaccctgatagggcctcgccgtgaggtctgaggggccgtgtgaggtgcatggcgcgccgtttcctctccaggcgctcctctcagggctacggccctagaagatctggcctgcaccagcccaaaggacatgacaggagtgggtagcccacgggacactggcacgagcgccatgatgggcggagacgcgcggaatcggccggcccggaagtgccagctgcctgcgtcggccggaagtgccgcgcgggaggcggaagcggctggttcccgcgtggtttggcgggtgcagcggcagtccggctgcccttcccacgtagaccgtctgctgggggcgccggcaccatttggagtacgtgaggtatacgggtagggcgcggccaggtcgggcgtctgttaggaaaaagactttttatttttatgtttattttttaagagacggagtctcgctctgtcgcccaggtaggagtgcagtggcgcgatctcggctcactgctgccttccacctctgggctcaagcgatcctcccgcctcagcctggcattacaggcgcgcaccaccacgctcagctaatttttaatttttctttttttttttttcactcctggccttaagcgatcctctctcctcccaaagcgctaggattgcaggcatgaaccacttctctcggctaggacttttatttttaatggtcaactgatttgagttggttactgtgagatattgtcacaggttccagacaggccataatgcacgcatgcattcacttacttattcagctcatggtacatttagaaactctaggttcatgtttaaccaacaaatgtgttcttccagtatgccgtttttcagacaatgatgtgtggcattcagaggtgttttacaacccttaataaaagagcaactaacactagtatgtgctatacatccattcttaatgcacccaccgtacctacttccatcctaacctgaaaacatagctgtctgtaaatgaggaaaggagcagcctggggatccagaaatcactgcaggggtcacgttttgtaccaaggcagtaggtttggagaggctctgaactggaaccaaggcccccaacttcaaaatgtacttggcccctagcgtttgaatttgctttaaggtcattagtaaatcctattcaatttgcatcaaagaatcttcatgatacgtactgtgctccataatagaaattcccatctgcctatgatgccattctcagagtttatatcccaaattcgctctcttttcctttgctttttcttttcctttttttttttttttttttgagatggagtctcactctgtggcccaggctggagtgcaatggctcactccaacctctgcttccccggttcaaccgattctcctgcctcagcctctaaagtagctgggattacaggcgggtgccatcacgcctggctaatttttgtatttttagtagagacgggctttcaccatgttgaccaggctggtctcgaactcctgacctcaggtgatcctcccacctcggcctcccgaagtgctaggattacaggtgtgagccaccacgcctggccccaaattcactttctttgtgagtctgtcttgtacagggaatagctgaagctttgtaaccaataatttaatattattagtatgacatttctatctgaacacattagtgttaagcttcttcccacaatccttggaaggggaatcacaaatcctaggtgaactcattagggcccaaagttctgctctgaaatctagtaataagagtaaaattaagccaggtatgctaattacacaagaatgctgcttttcacaaatccattcctttgctcttgttttcacaggaagaaaaatgtctgaaaagcagatgaaggaagcttttgtcagtaacctcaatggaaccaccgtgctggaaatcacccagggattgtgctttcctgcattctgtatcctgtgcagagggttcctgatcattttctcacagtacttgtgttctttttcacctacctggaaaactagattcctcactgactttgttgtcctaatagttcccatggtagccactttgaccatttgggcttcatttatcctccttgagcttctcggtgtaattatctttggggcagggctgttgtatcaaatataccgaaggaggacctgctatgccagactgcctttcctaaaaatccttgaaaaattcttgaacatcagtctagaatcagaatacaatccagccatctcctgtttccgtgtaattaccagtgcgtttactgctattgctattttggctgtggacttcccactttttcccagaagatttgccaaaactgagctctatgggacaggagcaatggattttggagtaggtggctttgtttttgggtctgcaatggtttgtctagaggtcaggaggagaaaatatatggaagggtccaaattgcattactttacaaactcattgtactctgtttggccattagtcttcctaggaatcggacgattagccattataaaatcaataggctatcaggaacatttaacagagtatggagttcactggaactttttctttaccataatagttgtgaaattgataacaccactgctgttgattatttttcccctaaataagtcctggattattgccctcggcattactgtattataccagctagcccttgactttacctcactgaagaggttaatattatatggcactgatggtagtggcacacgggttggtctattaaatgccaaccgcgaaggaataatctctaccctggggtatgtggcaatacacatggctggtgtgcaaacagggttatatatgcataagaaccgatcacatatcaaagacttgataaaagtagcctgttttcttttactggcagctattagcctcttcatatctctttacgtagttcaagtaaatgtagaagcagtatctcgaagaatggcaaatttagccttttgtatttggatagttgcttctagcctgatccttcttagtagtttattactgggtgatataattttgagttttgccaaatttctaattaaaggagctctagtaccatgttcttggaaacttatccagtcacctgttacaaataaaaagcattcagaatctctagtccctgaagccgaaagaatggaacccagtctttgtttaatcacagctctaaacagaaaacagttaatatttttcttgctgtcaaatataacaactggcctgatcaacctgatggtagatacattacacagcagtaccttgtgggccttatttgtggtcaatctctatatgttttccaactgtttaattgtatatgtactatatttgcaagataagactgtacaattttggtgatcagcaggagtaggatatataagtatttgggcaatatttaatgaggaatattaattgtaaagaaattgtgcttttggcaacagtgttaaccatattttattataaaatagtttcagtcatctaaacagcagtgatgcttaattatttttttttttgagacagagtcttgctctgttacccaggctggagtgtagtggtgccatctcagctcactgcaacctccacctcccgggttcaagcaattctcctgcctcagcctcctgagtagctggcactgtaggcatgtaccaccatgcccagctaatttttatatttttagtagagatggggttttgccatattggccaggctggtctcaaactcctgaactcaagtgataacacccaccttggcctcccaaagtgctgggattacaggtgtgagccaccacactgggccaatgcttaatattttaatgtatctcaacaataaaaccaagaagaaacaaagccttttgacttgttagaatgtattaagtagtattttaaagaaactttatagttgtgacattgaaagactgttggggtggggggaggaaaatttttactttccatcttaatgtaaccttatgctattctgtatttttactgtatattgcttttacaataaatataaaatgaaatgtttatgttgacatttcagtgtgaactgtggattgtcaatacttgtttattgctcaatttaaatttttgaataaaacctaggactaagaagcaagtgtttaaaatcaaacactccaatgtgcagatgggtggatataaaaagaaaaattttaaaaataaaatacttatatactatgaagtcagacagttaaatgcaccaaagaatagatggaaggctgggcatggtgactcacgcctgtaatcctagcactttgggaggctgaggtgggaggattgcttgggcccaggagttcaagaccatcctgggaaacagtgagaccctgtctacaaaaaaaaaaatagactgaattggatgttatattatagcttatacacataataattacgagacaaagttttgctttgggattaattcatcttttagcctaccctatgctagggatttaagaagcacagcacaaatttcctgatacctcagagcttgcaatctagtggaggaaacagacattaaacatctattgtgaaatgctaagttatgaagaaaaagcataggttgtcaagagtgtcaaatcaagaactgacctagtaaggagtcaagttttccccacagatttttttttttttttgagctagagctgattagtgggatgaggagttataaagtcttatgtgtctgggggctggggggcaaatggcagagaacattatagatggatgactccctcagcaaaagtcctacgttgggagggcaccaagcacataatggaattgaaagaaggctgaacacagaagaaggaagagcatgggcagagagctggagaggcaggcaggggccacatcaggcatcctcacctaccatgctaagggaaaggagaaccaataagaaagatgagagtcatcaagtacccagtgtaatttaataaaactatggctaaattaaggtttaatttaaatctgtaaaaaatagagatggggttgcccaggctggtctcaaattcctggcttcacgtgatcctcccatcacagcctcccaaagtgctgggattacaggcgtcgtgatcctggcctataatgacgtttaatattctactgtcttttttttttttttttgagatggagtcttgctctgtctcccaggctggagtgcagtggcacagtcttggttcactacaacctccgcctcccagattcaagcaattcttctgcctcagcctcccgaggagctgggattacaggcacacgccacttcgcctggctaatttttgtatttttagtagagatgaggttttaccatgttggccaggccagtctcgaactcctgtcctcaagtgatccgcccaccttggtctcccaaagtgctgggatataggcatgagccaccgcacccaaccaggtgtgtttatttttgacagataaaacagaacttcccagtgtcagctcatgaaaaagaaaacccaatccacagatcctcaggtttaggtcactatggtaatttaaataacattctgtggccatagattgtcttaccacataaaactgtggttattataatgaaacaacaaaaagtcttctaatcaactatcattttccttgcaactatcaatttttgagggcagaggagagggaaagataacaaagtgaggagtaagaagaacataatctgtccaggacctcagcctatctatgcccttcagaaagtgactcccataattttaattttttttttttgaggcgcagtcttgctctgttacccaggctagagtgcagtggcacgatctcctgcctctgcctcccgagtagctgggactacaggtgcccgccaccacacccggctgattttttgtatttttattagagacggggtttcaccgttagccaagatggtctggatctcctgacctcgtgatccgcctgcctcggcctcccaaagtgctgggattacaggtgcgagccaccgcacccggccaattttaattttacacaattataaactggggatgtctactacacgtgccccagtagctcttgtgtgccgaagatgacaaccagttttatttttattgagcataaatgtccaatgtatttatataaatcatacaagaaccttatgttcctccctaggagtttaaatatagtctatgaagctaagacataataaggaataccttggtacttttcattttttttaaacctaggtagcctggagaacagatagatctcatttatgcctgcattttgtggctagcgtctcacacatttggacctaagaaaaagaatggtagtttgctgataatttattacagctccgtccctccaactgttctttattaggtaccagcaaaatgtgttctgctgttgattgcctttactttcctggcctttcaaatcctttgaacttgcatttcacaatgccaatatcaaaatgaaataataggcaacagacaactgtcttttaatgtagcaattatatatttcgtcaattagaggtttgctctctaaaagcagatacttttcattttaaagtacataggataattctcaagaagtatttgctgcagtactggtggttatggctaaaaatagagcaatagtgaaaataaaaataagtgcctactctaaaaccaggaagatgcacagtgaaaactttgaaaaattattttgccatgaaataattttctaagcgttttccttgggatattgattttattgtatcgattgtattatattgtatggtattagattagattagattggattggatttatagcacccaggctacctccttgagaaacagcaacttacctagcaaatccacctttttcgcctttaagaatacgttttcattgaattcctatttgtccaaagatactaagtatgcccggtggacctaagagacaaacccaaattagggaaagtaagctcagatggaaagagacctttgggatttcattttattatgttttatatatgttttaataccttttcacagatttaaatccccagggtgaatactcccttctttgttagtacctggcgtgtgttcagtagtcaaagtaattaaaattagcacctatataatgagcttgtcatttttaatgttctttaccaaccagaatcctaatgaagtctaaaaggtttaggctgggcacgttggctcacgcctgtaatcccagcactttgggaggccgaggcgggcggatcaagaggtcaggagatcaagaccatcctggctgacacgatgaaaccccgtctctaataaaaacacaaaaaattagctgggcgtggtggcaggcgcctgtagtcccagctactcgggaggctgaggcaggagaatggcatgaacccgggaggcggagcttgcagtgagccgagatagcgccactgcactccagcctgggcgacagagtgagactccgtctcaaaaaaaaaaaaaaggtttaaagtgggtacattaattgatgtaccactgtaggagcacctctagatactgaaggccacagtatcttggctcactgcaacttccgccttcccggttcaagcgattcttctgcctcagcctccggagtagctggaattaaaagtgctcgccaccacgcccagctgatttttgtatttttagtagagacaggttttctccatgttgcccaggctcgtctcgaactcctgacctcaagtgacccgcccgccttggcctcccaaagtcttgggattacaggtgttagccgccgcccccgtcctggtttttgttttgttttttacataaaacgcaagattctctaaaaatgtccaaattttggctatgtatatgaacatcatacatacgtattagattcaagctaatactcactcttctactctgctaacatggccagaagacataaaaaaaatttttttttgagacgtagtttcactcgtcgcccaggccggagcacaatggcgcgatctcggatcattgcaacctctgcctcccgggttcaagcgattctcttgcctcagcctcccgagtagctgggataacaggcgtgcgccaccacgctcggctaattttgtatttttagtagagactgggtttcaccatgttggtcaggccagtctcgaactcctgacctcaagtaatccacccacctcgcctcctaaagtgctgggattaccggcgtgagccatgaccccggcccagaagacataaatatttgccgggtaatgacaccttcgggaatgaacaatggttcttcgtttattatgtcaccgaccctaacaatgaccacacaatgtactaagtcaacatggctaagggtgcactatgggttatttgttgtgaatctctaagactccatgtgataaccaaaatactttattttgttttgagatggagtttcgctcttgttgcccaggctgcagtgcaatggcgcgatctgggctcactgcaacctccgcctcccgggttcaagtgattgtcccgtctcagcctccctagtagctgggattacaggtacatgccaccacgcccggctaatttttgtatttttagtagagacgggggtttcatcatattggtcaggctggtctcaaactcctgaccctcaggtgatccacccacctcggcctcccaaagtgctgggattacaggcgtgagccaccatgcccgacccaaaatactttttttaaaggtatcacagctccaggaaatagagcagtaaattgatctgtccttcagatcaccaggactttcataggctaaatatcttcacaacagacctccaaaaccttcaaggtcagaactgaacacacggtggcgagaggaactgtcttcacagcagctctgcttcctcggagacggccagagggaaaggccgttggccagtgccagtacttcgcccaagggagtacctgctcacattaacccagcccaagaagttcctttggccaagacgcacacacacacaccactgtccggttttctatttccttccagtgtaacgacaaccacaagctatcagcacttcactatttgctgtcccctcagcgggatcgggatgcagctacgcagcgggcccctggcgagccgcggtgtcagggcccttttctcctcttcccaccgtgggaagcgaattcagtggcgtcaagggccaagagccagacctgagtttgtctctcaccccccgatgctcgtctcccttttctcactgccttccgccccctctgatctcgacttctcgcaacctatccaggtcctctctgggcctctgccctgagtcagccccgaatcagacgggcttgactcgctgaaagaattcccctttgagaggaggcagattcccctctacatagacgacaccctgacgtcgaggggcttgcccctcgtccgtggggaagccttcccggcccgcggctggggcctgaggttgggccgatcacccctcctaccagtcctagttcgggtctagcggaatggctgggctccgagaagggcgccgggcccacgggcgggacggccagggcggccccgcaccctctgggcgcaaatttctccagcggggtccccagcgcggccagccccagtctcgcgagaggacgtgggtcccgcccggcgcccgaccccgcccggccccaccttcccctcgtcccccgccctccttcttccactccccgcggcgcgagcggctgactgcccgtagaggaaacgacattcggagctgcgctcccgcccacgccggccctgacgcgggcctcgtcagccagtaacagggagcagaggtgggagttagcgaggcgaccacgaaaacggtgaaggtcggaaccgacagcctcctccgagaagggtgaggaaagggtctgagcctccccgttccctggactccgcagagccgctgcggggtcgatccctcccaggggcggggtcgcgctgggcaactgcagtcctggggccgactgggcggggtgcgcccagaagcggggagaaggggtcagttgggggcagagggcacccgggcggcgggcggcggggaacaggctgcggggcccaggccaggggtggggtcctggggccgggactcctgcagcgggcggggaagcccccggcaggccggtcccttccgcctctcctttggaccctgactggaggccggcgggcgggcgggcgggcgggagagagggagggagcgcggcgcgaggggggcgggtcccggcggcgctgggcgctgattggctgagcgtgtgtggaatcgggtgatgggaaacgcagcccggctctcccgtaccctcccgctccgctccctgccccccgtggcgaatgtgctgcgcagcggcgggtgcttacgctcgcggggtttggctgttgcaggcaggagctgggaggaggcggcagcggcggcggcagaaacagcagcggcggcggcggcggcagctgggaggaggtggtgacggtggcaacggcagcgtcggggacgatggcgcgactcgtggcagtgtgcagggacggggaggaggagttccccttcgagaggaggcagattcccctctacatagacgacaccctgacggtgagcgggccgggccgggctgggcccgccgctcccctggcagctgtttcccctcctccccctcccccaggccgagcgctgcgcactggagaaagagtgtgttgcaactcctaggcgaggccttctcttcagcaggccccacaaactcgcctttgcagtgggtggctcggtaacctctgtcggccccaagcccagagctccgtacgcactccctctctccagattttccttcttttggaaccttattccttgaccctttccctttaggagacgctgcttttgtcaaagcacacatctcagagaggggttgaaggatcttgggcgtttagggcctaccccatacagaaaccacctaccctcggggaggcttaattacctggtaatgtcgcagctgcactgctacctgtgtattttctgttttaatactggtagctctcaccacataagcttaattactgggggcagagtgacatgctcgtgcacagtcaagattccactaaaatggtttgatttcgttgtaaatagtctcgtattgcctaatgcattaaaactcttgaaatgattgtattgctaggccctttcttcaaaacgggctttcttcgcattatttagtttacaggtggacttttttttttttaaaggaagccaaattattgaatgtgtaagagtactataaaaagctgattgctcatcttgagtgtcaagacccagttccgggtactttattctttagatttggtagtgtagcattatcgaccctctgccctatgttgctgtactgtttcctttaaaaggaaatggctgaaatttgaattgaatctgaacaggaaatgagtgcagttgcttgccacttaagaaatgaaattaaccttttccgaatatcttttgaaatctgcgttttgatgatgctgaagctttggattatacatttgcttatttcgataaggtgcacctaagtctcttcatctcatcagtattcttttgctatcaaaggcagttgatcagttttgttcctcaatatttttttttgcaaatatctaccgaagttttttcaaattttatgtaaaatgcaagtcattgtagagatgccagtctatgcctttatgcttgccagtctcaattaagacttgattgagctgcagtactttaaaaaggattagaagagctattgaatgacttaatttattagaagtttttaagtgacagcatttctaattattcaagtgcatttatttttcatgaaaaaaggtagaatgatttgttctgacataaagtaaatagtgttgatgcattagaaattgtgtgtcttgattatgatttctgtactttttgcattagaagtataatggacttgtatttttaaatagttgaaactagcactgtgatcatattaaataatgcatttctcagtttggacttcagatagggattcatttgttgatattttctttcttctctcccctgctaacataaacacttttctgaagcatatagttatgatatcagcctttaaggtttattgtcccacaatggctgtggagttaaaaaaaaaaattcagtgagtttggatataagattattatttaatgaataatcataacataggaaaacatatcaaaacatagggaaaaccaacataaatagtcttcaaaagacactagttcttggtatattcacataaccacctttgtgaatgcagcacattaatacatctgtcatatagcactttaaaatggccaactttttaagtgcttttatactgtattctctccacaatgatgtgactttccaaaattttccactgaaaaagatgtaaccttgcaatgtggtttagtatggaacttactttgcactgtatctggcggttgaattttgcttttattgtactgtggacttgtgactaaggcaaataaaacttaagctcacttaatttaaatatctcaaaataacatttaggaaaaggtgcagtttttctttgcttcagaatgggtttttatcacaaaggaatgagtgagacatttatttgtgctgggacttctgcacagtcattgaatgctgtgagtgaatgttagtgaaaattcttgtcaagggaaacaagtttctttcaggatattctaccaaatactactgaaagggagaatgcagagcaaaacacctgttgggagagaaggggaaaagggaagagggaaggaagatgcccctatcagagttttatgctctgcattgttcctttgatagatggcagtggatgcctgaagttaaccttaggttttgtctttgtccctagggtctgtaggtaatgcactgaggaaacattgtttgaacttatttcaaatagtagtcttaggattttgatagtagctaaatgttgcaatatagttacaatgtttacaggcagttgcagactttatcattttagttgggatgctgaaactttacccttagttaaactggcagttgtaatttggacttgtaaaatgaaattaacaaacttgtatgtaaagaagtagccttaggctgggtttggtggctcacgcttgtaatcccagcactttgggaggctgaggcaggtggattactggaggtcaggaattcaagaccagcctggccaacatggcaaaaccccgtctctactaaaaatacaaaaattagccagacatagtggtgggtgcctgtaatcccagctactcaggaggctgaggcaggagaatcctatgaacccgggaggtggaggttgcggtgagccgagatcgcaccactgcactccagcctgggcaacaagagcaagactctgtctcaaaaaaaaaaaaaaaaaaaaaaaaaaaaaaaaaaaaagtagccttaggcccggtgctgtggctcatgcctgtaatcctagcactttgggaggccgaggctggcagattgcctgagctcaggagtttgagaccagcctgggcaatgtggtaaaaacctgtctctactgaaatacaaaaaaatcagtgggtgtggtagagtgtgcctgtagacccagctactgatgagactgaggcaagagaattgattgaacccccagaggcggaggttgcagtgagccaagattgcgccactgcactccagcctgggagacaaagtgaaactccgtttcaaaaaaaaaaatagcctcttcttttatgtgatatgttgtgtccatgtttagaagattcccatggtagttcagtgagtttgaacacctgagtataggatagggctgatgtaggtgtacttgagaaaattccaaataagttggtggaatggtgaaatatttaagaaagttttatactctggctaaaatgttgttcagtgttactacaattataaaataacagatagaatacatatttgattttagagaaatctgaagaattaaagtttttttttttttgagacacagtctcgctctgtcgcccaggctggagtacagtggcctgatcttggctcactgcaacctctgcctctcaggctcaagtgattctcctgcctcagcctcctgagtagctgggattacaagtgcgtgtcaccacgcccagctaatttttttgtatttttagaagagatgggggtttccctatgttggccaggctggtcttgaactcctgacctcaggtcatctgtccgcctcggcctcccaaagtgctgggattacaggtgtgagccaccacacccggccaaaatatatattccttctaaaatcttgaaaaataactacaaaacaaattacccttagtcatgcttctcagggataagcacatttggtgtaatttcagtcctagacacacagatacagttaatatattctgtaactttttgtccttatttatttcactaaatgtaattttgaaaacattttttcttgtcattcttaaacatttttaatggctgtgtaatattccgttgtatgacattctgtaattatttttccactgttggacatggaggttgttctagtttttgctatgaataaactgtaagaacataaataatgcaaaaatctttgcattaaaatgttttctcaggcttttggaagtggaattactggttggatcaaaggataagaaccttttgtaaagttccaggtacatattgtcagattgctatgatatttctttttttttttttcgagatggagtctcactgtgtcacctaggctggagtgcagtggtgtgatcttggctcactgcaacctccgccttccaggttcaggtgattcttgggcctcaacctcctgagtagctgggattacaggcgcccgccaccatgcccggctagtttttgtatttttagtagagacgaggcgtcaccattttggccaggctggtctcgaactcctgacctcaagtgatctgcctgcctcggcctcccaaagtggtgggattacaggcgtgagccaatgcgcccggccagattgttacatttctgcattgcagtttactctcctaatttaaaccaatctaaatagactactctgataagagtttggggttttgttttttttttctttttgttcttgtttgcatgtacagcattaatctggtaagagttcttaatgtcttacactttaaaaaaatgataaatggtggcatatccacttgggaattagatgttttgtaattgttaaaagttagcatttaatgttttctttcaacttttaacagttaattttactgagggtgatagatgttacaaatagctgtgtggagtaaaaccaaaatgacagtgattttaataaatgcaaacttagtatattgttggttagaacttgtgagaatgcgctaaaaacaggttttttttgtggtcaggagaaaccagaacagatacttaagagtgaaagtgggtaattgattcaataaactttataaagcagtaattgcagcacaatgacttgttctatttgttgctagctatgggtagggaacctcttcatgaagctgaatgctaatgatgcctctataaaaccacacctgaaatactttacaggactgtcttcctttaggtaacctagaatctcaagattaagttaaggaagtggttttaaagaatgaagaacaaattgtgctactagcctctttgccttcccctttttattttcatctcttaaaacactgaacagcatatagtgattggccagaaaacagtaaggtaaaaagccattgtcctaagtgtttgaaaggcgaggacagagtatttagtttgagtgcattgtctccagccagagtagtgagtaaatacaagagaaaatttagtagtatgcaagctgatgaaaccaggaaagatagaaatagattagatcttagtatttttgctactaattaggtgaaaatgaaatgattggaaacaagttttgtttttaaaaataaccgtgttctttattgacttttttttttttttgagaccgagttttgctcttgtcgctcaagctggcgtgcaatggcacgatcttggctcaccacaacctccgccttctgggttcaagtgattctcctgtctcagcctcccaagtagctaggattacaggcatgtgccactatggctaattttttgtatttttagtacagacagggtttctccatgttggtcaggctggtcttgaactcacgacctcaggtgatccacccgcctgggcctcccaaagtgctgggattacgggcgtgagccaccggcttctttattgacttcttagaaagaattcctaaatcaggtattatccatataattaaaatattttaggctgggcgcggtggctcatgcctgtaatcccagcacttttggaggcctcggagagtggatcacctgaggtcaggagttcaggaccagcctggccaacatggtgaaatcctgtctctactaaaaatacaaaaattagctgggcatggtggtacgcctgtaatcccagctacttgggagaattgcttgaacctgggaggcagaggctgcagtgagtcgagattgagctactgcactccagcctaggcaacagagttgagaccctgtctcaaaaaaaaaattttacaaatcagctcgcaggtctcagtattattagatgtgttctttgatctccgtttcaatttttaaaacagttgatcagaatataaatacatactgagtcagaatttaggattttgcctaagaaccagactggagagattttgatttggttaaataaggaatattctttgtttcttaaattgatagctttgatctttaaacagtatagataattgtcattttttattacggctattggtatgtggtgaaatggtgtatatttgtatcaagcaaatgaaaatataaatcaaggtattagttacttaaatggtaggtttggagtgacctccaatattctgttgagttacatggctctaaaagtttatacctttttaatgacttgacagttaaatttttgtgtgtcttaaaccttttgatgattccagaaaatatgagttaattgaactattaactattttattgcttttattataatagttttctggaccaggatttccaataccaggattattattatttttttaaatttgagtagagcatgttaattagaataaatacaataggcagtatggttcattagatattttgctcttttcagtcatcctcaccagattattgatagctacagcattaaaatagaccattgacttcagttttgctttgtgctgttgataaagttaatgtatgaaagtgcttataacaatgtctaatacacatgaagtgtctttattattacttattgctacccccctttagaggtattaataagactgagaaggaaaactagaaacaagatgtcagggttgataaacctgaaaattggataattgacatttggacatttcatctgtatgcatggaagaaaaaactttcagaatggtaaaagctattgaaatgggtcaggcgtggtgactcacgcctgtaatcccagcactttgggagtccgaggcaggcagattgcctgagctccggagtttgaaaccagcctgggcaacatggcaaaaccctgtttctactaaaaatacaaaatattaaccatgtttggtggcaggtgcctgtaatcccagctactcaggaggctgaggcaggagaattggttgaacctgggaggcggaggttgcagtgagccgagattgtgccactgcactccagcctgggtgacagaacaagactctgtctcaaaaaaaaaaaaaaaaaaaagctattgaaatggaagcatgtctctaaacatggtatagtgaatatagaattggaagcaaggagcattaactcttcccctgccataatatatagtatatatgcattgtaatacatttgggaaatataggaacacatacagaaaaagttgtcttactacctagagatagccacatctaatatgttttccttttttgaaagataaagtatacacactgaaaatttgaagtgtgttgcacatgcagtctggattatgttagtatttgcatcatagtctatcctttagtatctatttgtctctgtacttcatatatctcatattcctccgttatcaagaaaaactcttaaatctattgcttacgtttgacttagctgttaatgaggcctcattttgctgttagaacaaacatgttttaaatttctctaatatggaaggaaaggaatggttacatctattaaagaagcaggtctctggtgctggttggggaagggagtgatctttttaagatcgcattcaactgggtagggatattttgtttttgccttaaatcggtgtttttctcttgacttcactctttgattttgtaggagtttgtggtccttgttatgtggcaatgtggaaatagtttgtcctagtacgatatgtttgatctttaacaatgttttagttaagatatacatgtgttactttcattgttttgaaggcatatctttttcccccacattttaatacctgaaatcaggatgctgcttgaatttgatgacatcttatagtaaaaatggcttgtagtgatacataactatggtactaaaaatctgtggtgtgacaacagatcagtaaaatgtactaattacacattcccattatgtgacatagtgaagcctccttaagtttcatatgccttcctatggtagtgaattttgataattgaataagtatatcaatgtgccctttttgttcataattagagcaaacatttactatgtgccaggcaggtactgttctggccaggcacagtggctcacgactgtaatcccagtactttgggaggctgaggtcaggagttcgagaccagcctggccaacatggtgaaaacccatctctactaaaaatacaaaaattagctgggcttggtggtgggttcctgtaatcccagctactcgcgaggctgaggcaggagaattgcttgaacccaggaggtggaggttgtgatgagcttaaatcatgccaccgcactccagcctaggtgacggagcaagactccgtctcaaaaaaaaaaaaaaaaaaatggaaacttgtcttatgtacttgaattttttttttttttttttttttttttttttttttgacagagtttcactcttgttgtccaggctggagtgcagtggtgcgatttcagctcgctgcaacctctgcctcccgggttcaagtggttctcctggctcagcctcccaagtagctaggattacaggcatgcgccaccaaacctgcctaattttatgtatttagtagagatggggtttctccatgttggtcaggctggtctcgaactcccaacctcaggtgatccgccgccccccaccccactggcctcccaaagtgctgggattataggtgtgagccaccgcaccaggccatgtacttggatttaacaaaattttttgaggggctagggatgggtgcaaatctggctttcacgggtctatttctggagtttgtaggctgtatcctgttctcagaggggtaaagtaattgatttccgttctgtttgcattttaagatggtgatggaatttcctgataatgtgttaaatctcgatggacatcagaataatggtgcacagctaaagcagttcattcaggtaatagttttttcaatcagtgtttttaatggtgtatgtgtattttaaagactcatttaaaatttagctgtattaattttatataggattctctaggtcttaatattgcactggaattgctctttcaccattgctatagtaagcatgcatagttatttacatgatttatgtaactgccatgtgaaaaagaattggtggtggtgtgttaatattttacatgtccataagactttaattttaaaaccaggccatctttcctagtttttaaaagataaggtatataatttttcattaaaaacttgttggttttctgctgtactaattgttttgttcagacaaagtaatcctatattatgaattttctgatgtttgtttaattcctgagaaatatagtgctttataaatacacttaaatgcaatgtatagtggtccctcagtatccgtgggggatagttcaaggatccctaggcaaaccaaaatccacaatgcttatacaaaatgatatagtaagggctaggcatggtggctcatgcctgtaatcccagcactttgggaggccagggcaggtggatcgcttgagttcagtagttggagaccagcctgggcaacatggcaaaaccctgtttctacagaaaatgcaaaaaagttgggcagacatggcagcatgtgcctggggtcccagctcctccgtaggttcaggtgacaggatctcttgagcccaggaggcagaggttgtagtcagctgagatcgcatcactgcactccagcctgggcaatagagtgagaccttgtctcagaaaaaataagatgtatatttgcatgtaacctctgcacatcctcccatatactttaaagcatatttagattacttatagtacctaatacaatgtaaatgctgtgtaaatagtagttatactgcatctttagggaataatgacaaggaagaaaagtctgtacatgtttagtatttcctgtcaaatattttcgatccttggttggttaaattcacagatgtagaacccatggatatggagggctgactgtaattaagatattggaagatgacttgttagtttacttcagaactcttatttctacttttaggaaaactttgaatggaagggtaatggtaaatgtgagaaaatgcttcttgggaattgtcctactttcctatccgtttttggcaaatctgaaagtgttaactgcagttaactataactccatcaggtagaagttacttactagagtttgctcatttctctgcaacagtagctctcagttatttttctaccttgtcataaccagcagatacaattcataagcagcagcatgctagttacttccctacataaggaagataggccatgttttctcccattaattcgtaatatacctgttcatgcctctggattgggaattgctgctccatatgattaccatcctaacttgactcctgtagctaaacatagtgatagtaagtgtgttgttaaaagttgtcaaaacaaaacaaaacaaaaaaaacaggccaggcgtggtggctcacgcctgtaatccgagcactttgggaggctgaggcgggtggatcacaaggtcaaaagatcaagaccatccttgccaacatggtgaaaccccatctctactaaaaatactaaaattagccgggcgtggtggtgcacacctgtagtcccagctactcgggaggctgaggcaggagaattgcttgaacccaggaggcagaggttgcagtgagctgagattgtgctactgcactccagcctggcgagagagcaagatgccgtctcaaaaaacaaaaacaaacaaacttaaaaaaaaggtacagctgtattgtgctttttttttttttttttttttttttttttgtgagaggactggcctaatactcactgaaccagccctacatttccagatgcagtactgctttttggcatcctaagcagagttgtttatataccctagattctagagcaagggggtttgtggaggaaattccgtacagcatggacaaagctgactactttgcctttctgactcagttgcaggtagagctggtaaaccctggccaggttgtactttactgcacaaggataggaaccagtagtagtgaaagtgtaattttacgtctttttaaaggacactctttcattttctttccctctttcagcgacatggtatgcttaagcaacaggatctaagtattgccatggtggtgacatcacgcgaagtcctgagtgcactttctcagcttgtcccatgtgttggttgtcgtcgcagtgtggagcgtctcttttcccagcttgtagagtctggaaatcctgctcttgaacccctaacagtagggcccaagggagtcctgtctgtaactagaagctgcatgactgatgcaaagaagctttatacattattttatgtacatgggtaagtataatcaattaggagaaaatgggtttgttaaaatttaaaacagcttggtgacagtggcagcttattttcttgatggaaagattgagtctgatttaataattttattgagtaagttgtatgtaccagtggatgtaaagtttcaactctccacgtggggagaggcagacagaaagcaaatattcaatttgtcagggatgataagttagaaaaatcagtaagggaggtagagaatggagtgggggtagaattattgtggaggatggtcagggaaggcctccctgataaaatgacattgaatatagatttgaatgaagtgagcaagcaaatcttgtagaaaactggggggaaggcagagaagggacagctagtgtaaaggttctgaggttggggttttattggcatgtttgaggaatagtaaggaagcccttgtggctggagccagatgaatgaagggaacagtaataaaagatggggtcagcagagtaataaggccgggcgcggtggctcacgcctgtaatcccagcactttgggaggccaaggcaggcagatcatgaggtctggaggtcgagaccatcctgaccaacgtggtgaaaccccatctctactaaaaatacaaaaattagctgagcatggtggcgcatggctgtcatcacagctattcaggaggctgaggcaggagaatcacttgaacccaggaggcagaggttgcagtgagccgagatcacgccactgcagtccagccagggcgacagagcgagactccgtttcaaaaagaaaaaaagaagagcgactgggcgcggtggctcacgcctataatcccaacactttgggaggccgaggcagttggattgcctgagctcaggagttcaagactagcctgggcaacacgctgaaaccgagtctctactaaaaatacaaaaaattagccaggagtggtggcgggtccctgtaatcccagctactcgagaggctgaggcaggagaatctcttgaacccgggaggcggcagttgcagtgagctgagatcgcacattgcactccagcctgggcaacaagagtaaagctccatctcaaaaaaaaaaaaaaaaaaaaaaaaggtaataaaaggtccagtcatatttttattttttcagacagagtttcactattgttgcccaggctggagtgcaatggctcgatctcagctcactgcaaccactgcctcccgggttcaagcgattctcctgcctcagcctcccaagtagctgggattacaggtgcccactaccacgcttgactttttttttattttttagtagagacagggtttcgctatgttggccatgttggtcttgaactcctgacctcaggcgatctgcccgccttggactcccaaagtgctcggattacaggcgtgagccaccgtgcctggctgaggtctttttttttttactctgagtgaggtgacaagctttgggaaggttttgagcagaagagtggcatagtctgatgaaatctggcttactttgacctctgtattgagaatgaatgacggctttggaggtagtgaaaaatggttataaaggatcctggatatattttgaggaatgagccagtgggattttttggatagattggttgtgagggaggccatcaaagatgattctcagatttgtgatgtaaagaatggacaacaggccttgcgtggttgctcacacctataatcccagcactttgggaggtcggtgagggtggatcaccagaggtcaggagtctgaaaccagcttggccaacatggtgaaaccccatttctactaaaaataaaaaattagccgggcgtggtggcaggcacctgtaatcccagctactcaggaggctgagacgggaatcgcttgaacccgggaggcggaggttgcagtgaggcaagattgcgccactgcagtccagcgtgggcaacagagcgagactctgtctcaaaaaaaaaaaaaaaaaaaaaaaaagaatgggcaaatggttaccatttaccgagagggacgagactgaggagaaatgtaacagagctcatctttgggtgtgctaagtttgagatagcgattagacatccaaatagaattcagagaggtctgggttagagatgtaaatttgtctcatttagtgaatataaataggaaaagaagaagaggtctgaaaagtaaacccgaggctttcctatttagagatggtggtagggacttttgatatttactgtgcctgggcttgagaaaataagccttggagtgtttttgaacagaggaataatgtaatctgattcatattttaaaaggatcactgtagctgctgagtgaggcctggaatgtaaagggcagaaggtgcagcaaggagaccatttaggaggccagctattgcagttgactaagctagagattggtgggttggacagggatgataatggtagaggtgataagaagtgatctgattctagattggttaatttttatttagcttttattctatcttatttattaatttttttgagacaaagtctcactctgtctcaagctggagtgcagtggtgcaatcttggctcattgctacctccgcctcccagattcaagtgattctcgtgcctcagcctcctgagaagctgggattacaggcgtgcaccaccacacctgtctaatttttgtattttttttagcagaaatagagtttctccatgttggccaggctggtctcttaactcctggcctcagtctcccaaagtgctgggattacaggtgtgagccaccatgcctggcctcattttaaaattttctgtagagatgaaaattttgctatgttacccaggctggctttgaactcctggcctcaagtgatcctcttacctcagccttccaaagtgctgggattataggcatgagctactgcaccaggcctgattctagataatatttaaaaggtagaattggcaaactttgctcattggttggatggaaggtgcggatagtagtagtgtgtattccatatttgcataaaagttctgttgatgactcctcttcaaggatgtattgtgtttacataatgttttgtgaggtttttatatattttttaaagacatgggatctcactatgttgccctggctggtctcaaacccttgggcttaagtgatcctttcacctcggcctcccaaatagccgggactacaggtgtgtgcttctgcaactggtgtatttacataatggctgggcaagggaagatggctgagagtcaggtagcagtcagtgttgaaataacgtgagtgccaggcacactgctagatacagtggggatagagaaaagtggtttttttgtgttttgttttgagacttctctctaaaagacagtaaatagagattttaaaatttgaaagtaaaatgaattaaacccttaatatgttttatttttaattaggtccaaactaaatgacatgatagatgctattccaaaaagtaagaagaataagagatgtcagttgcactccttagatacgcacaagccaaaacctttggggtaagtagaattgaataccaagaggctttgtcattgttaagattatatatttgatcatatttagtaaaagaaataaacccactgtttgctttaattcattaattggttatactctatgacataggtcaaaataaatagatcctcttgttatgttggccattttgccttgatatatataaagtctcaatgtagatctgatttaaaaaaatttttttatgttaaatatgttttagaggagggaggttgaagtctttttttttttctttttttgagacggagtctccctttatttcccaggctggagtgcagtggcacaatctcagctcactgcaacctccacctccctggttcaaatgattctcctgcctcagcttcctgagtagctgggactacaggtgcgtgccaccacacctggctaatttttgtatttttagtagatatggggtttcaccctattggccaggctggtctcggactcctgacctcaggtgatcgcccacctcagcctccaaagtgctgggattacaggtgtgaggcaccacactcggccggttgaagtctttatggaaatgtatgcagctaatatgaacgttttcaaagtagtggtaatcattatttgatctacagaatagtcataatgtataaattatttatctttcttgtctctagctgtaatttaccaaggttttaaaaaaagtagttatgacgatattatgacaatatgtatttatgtaactaatttgtagttttctatatttattattattttttgagatggagtctcctctgtcgcccaggctggagtgcagtggcgtcatctcggctcactgcaacctctgcctcctgggttcaagctgttctcctgccccagcctcccgagtagttgggactacaggtgcgtgccaccaagcccggctaattttttgtatttttggtagagacagggtttcaccgtgttagccaggatggtctcgatctcctgacctcatgatccgcccacctcggcctcccaaagtgctgagattacaggcgtgagccaccgcgcccggcctattttattttttaagcaaatattgcctgataataatttgtagttttcttcttgattaagtgctatagtgtccaaggctgctttttcactttctcccagcacagtgccatagttgtcccctacaaaattgcctgggggtggggatagtgaggcgaagccatggagtgtgaagggactttctaagacgtgactttagttttggagagaatgggatattaaaaaactatacttctttattaattttatcttttaattatttttttgagacacagtcttgctctgtcactcaggctggagtgcagtggtacgatctcagctcatgcaacctctgcctcttgggttcaagcaattcttgtgcctcagcctcctgagtagctgggattacaggtgttcgccaccactcctggctaatttttttggatttttaatagagacggggtttcgccatgttgcccaggctgatctcaaactcctggcctcaagtgatctgcctgacttggtctcccaaagtgctgggattacaggcgtgagccactgcacctggcctctgaaaagttaatttttaaatatctcatttgtgtcattgtcacctttttttgatttttttttttttttgacctgaacttccgagttacaccattattgtatagacattttcctccctgacacaaagacttggatgaccaggcagtggtatgttaataatctattaagtttttttcccctataccgagcaacaaaaaatatttaaaacattttatcggccgggtgcagtggctcatgcctgtaatcccagcacttttggaggccgagacgagcagatcacaaggtcaggagttcgagaccagcctgaccaacatggggaaacctcatctctactaaaaatataaaaattagccaggcatggtggcacacatctgtgatcccagctacttaggaggctgaggcaggagaattgcttgaacccaagaggtggaggttgcagtgagctgagatcgtgtcgcctgggcgacagagcgagactctgtctcaaaaaaaaaaaaaaaaaaaaaaaaaaaaaaggctgggcgtggtggctcacgcctgtaatcccagcactttgggaggccaagttgggtggattctctgaggtcgggggttcgagaccggcctggccaacatggtgaaaccctgtctctactaaaaatacaaaaattagccaggcgtggtggcaggtgcttgtaatcttagctacttgggaggctgaggcaggagaatcgcttgaatccaggaggcagaggttgcattgagccaagatcgcaccattgcactccagcctgggcgacaagagtgagactttgtctcgaaataaataaataaataaataaaataaattttattagtaaaattgtcaaacatagaaaagtaaaaaatacaatgattgaacctcccatgcacttttaccaagatttagtagtaatcaagagttgccacacttgcttcatttatccacctttttctttgtattttaaagcaagtcccaggcttcgtgttactctattgcatccttccacatgcatctctaaatatatggacattttttttcacacattgccatcataacacctaacaaaattaagtgtaacaatcgaatacccagttcatacttagattttacctgtttctggttttttttttttttttgaatgttggtttgtatgaatcaggatccaaacaagaaccacacattatgttcttgtagcctgaagaaaagaagttttcttaaggatagttgttattttgctgcttgatttgtcagtatcttttttttttctttctttcaaattctttttttttttttgagatggaatttcccctgtcacccgggctagagtgcagtggcgcgatctcggctcactgcaacctctgccgcctgggttcaagtgattctcctgcctcagcctcccaagtagctgggattacaggcacctgctaccatgcccggctaatttttgtatttttagtagacacagggtttcaccaggttggccaggctggtctcgaactcctgacctcaggtgatcaacccgccttggcctcccaaagtgttgggattaacaggcgtgagccacggcgcctggcccaatttgtcagtatcttttaaaaattttttattttttattttttcatcagctcattcttccttctcagatttgtcagtagcttcagagaatttctgactctaaatgcagagtacaggctaatttttcacattagagatgacctgttggctgaaggcctaaagtggtatgatacagtaaagagcttgccttctggtgctttttttctgttaagcatattctttgttgatgaactgagaagcaagtagcccagcattttatgcatctgtgttcattgctgccttccttcaaagaccaatccttccactcttgctctgcactccattttctttgttttcaatcactttgcttattcagttacctacttttgttaaatttacattcagctctgttttcctatctttcagcttaagaaacaaaacaaacctccacagattttacatccccttctagctacagttccactacatgggaagtcatatgttttagaaggctgtttgctgagtatggaatcagtgtgaatggacttaattgatcttaagtggtgtctgtctcttgattaaggtagcttcagttattcccacaggccacatagaatagcaggctaagcagtacagtatgcttagccaaggctccctctcccttggatggtcaccactattaaatgctactatgattctccattttatgtatttccactccccctcctgctgctacatccccaccccccatagcttttttaatttgtttagtctatttccagagaaagtataatacagttgattaggttttagcctaataaatagaaatctaggtcagcctttctgagagtattctctcatctatgcaagtaaacccaggttattgtctgtctgggagtaagtttgagatctggaagaaagatctaggctggagttgtaggcctgtagtttatcttagagaatgttatgtaagatcacctaaagggaaagagagtaaaagaattctgaggaatttaatggtagaaaagaaattagtaaagaaacctgagaaagagtagccagataggtagaaggaagccaaggtgtaaaagcgttccaaggaagtctgatcaactatattaaatgcggccaagttatcaaggacccaaaagtggacattggatttagtaacaatgagataattggtgatcttgaagagctgagctagtgattgagtggaagcagaatccaggttgcaatgattgaaaagtgaatgcaatgtaaggttgtcatggattaagctgtgaatggagagtatgggagcagaatcagaaagtggaaaggttatttttttggaaagtttgatcttaaaagaataatagaaggcataaggtctagaatgtttataaataaaatcctgatttgagatacagattttttttatagagcttttttttaaaaaaaaaatgccttcacattctaatgatataataatcattctttagctgatttctctttatgaacctttccctcaattatgagagcttgagtttgagagtttttcagttctgggaaattatgcattatactgatcaagtatagttaataaaaggggctgggcggggtggctcacactggtaatcccagcactttgggaggccgatgcaggcagatcacgaggtcaggagttcgcgaccagcctggccaatatggcgaaaccccgtctctactaaaaatacaaaaattagccaggtgtggtagcacacgcctgtagtcccagctacttgggaggctgaggcaggagaatcgcttgaacctgggaggcggaggttgcagtgagccgagatcacaccactgcactccagcttgggcgacagagtgagactctgtctcaaaaaggaaatatcagagttgagaatagaaggatgtagcatggaaagtggaacagatgatgtttttgttgtcacaaataaggggagctaaaccttggcctgagcccttgtgagagggagtacagagctgaattgtgtggataacttacattttaggcagagggttgagaaatacccatttagctacatagagtaagttaaaagttcagaggtttttccgtctctggcgtccaaggtgtaatgaattccttggactgtactgagacctgcagaagaacagacaggagccagttgttcagaatcatgaaaaatcaagaaggctgtgattgaatggagtgtaaacccacatttcccttggaatgcaggtccaagataaatgtgctgcaacaaagcaaaatgtgtggcaattttcatactgaagttgaaccctgttggggagggagagtgggaagtttttagtaagtttgttaaaaaattgtatagggctgggcttggtggctcacgcctgtaatcccagccctttgggaggctgaggtgggtggattgcttgagctgaggagtcggagatcagcctgggcaacatgacaagaccctgctgtctctacttaaaaaatacaaaaaataaaaaaataaaaataacctggtgtggtggtacacgcctatggtcctagctattcgggaggctgaggtaggaggatcacttgagcccctgcaggggtggggttgcactgagccaagatcacgccactgcattccagcctgagtgacagagcgagaatctgtctcaaaaaaaaaaaaattaccacatagttcttattaatttaggctgtataaagtgttcgtcttagtgtactatcttttagtaaatgtaaaacttattcactgtaattaatctatgaccttcccagctacttatacatgtgaaggtagatgatagttttgttaccatggtttagctttaaaaaggagtgattacaaaaaaaaaattgagctgagcatggtggctcacacctgtaatcccagtgctttgggaggctgaggtgggagaatggcttgaggtcaggggtttgaggccaggctgggcaacatagtagagaccttgtctctacaaaataaaagtaaaaaaaaaattacttgatgatgatctcattaagtagatcaaaacttcttagaattttcaatttgtggaagattggtctgtgtttaaaagggaaaatacttgataattttttcggtcattttgactttagaacattccaactatatttgctcatagaatacttagtttattaaccagttgctctcttgataactacagatgttgttaaattgtatcagataaacttgatagtcaagcagaagtttttatataaagatatgagcacacatttaaatgaacgttatattaatataaagtgagtatgtaatcatataatttgtaaacatgttctaatatcttaatcattaaagtgttcatgattttaatttagactatagaaattatttcttcagattatctcagtgtcactaagctttgtactatactacggtgaagggagcagtagcagtgtcagttcagagaagttaagtacagatgagaaatagtgaaggccacaggaaggacggcaagtataggatcattttccattatggacgtttccagggaacagccaggtaaaaacaagcaatactttaatctgttttttgtttttttaaggttttacccttctgtattctcccttttcactaatatttgttctttctacagaggttgttggatggatgtatgggaactaatgtcgcaggaatgcagggatgaagtagttttaattgactcgagttgtcttttagaaacactagaaacatatctgcgaaaacacaggtaagtctgatggttgttccagtataatgtggaaggtgccttatgtgtcagtcacctagagtggcctgtcactgaactcctttgtataatagcattctagccttccctttaatacttggcactaggcggagcttaatattagagtaggcagttcctttttttttttttgagatggagtctagctctgtcgccaggctggagtacagtggcgcgatctcggctcactgcaacctctgcctcccaggttcaagagattctcctgcctcagcgtctcgagtagctgggattacaggcatacgccgccacacccagctaatttttgtatttctagtagagatggggtttcaccatgttggccaggatggtttagatctgctgaccttgtgatccaccaacctcggcctcccaaagtgctaggattacaggcatgagccactgcgcttggccaaagcagttgctttatgggatgactctcagggttagccttcttgtgttaagccagcatctcctattttgtgatttttttttttttctttttgagacagagttgcactctgtcacccaggctggagtgcagtagcgagacctcggatcactgttccctccgcctcccgcgttccagcggttctcctgcctcagcctcctgagtagctgagactacaggcgcatgccaccacgcccggctaatttttgtatttttagtagagacggggcttcgccatgttgttcaggctggtctcgaactcctgacctcaggtaatccatctgcctcgacctcccaaagtgctgagattacaggcatgagctgtgcccagcctataatggcattttcaaaattaaattagtagctttttacttaatatttgaagtatttcttctgtcattatcaggaccccaaaagagagttgatattcatgtgttttgttactataaaagtaacttcagatttttctttatagaacactacttttacaaaggaattttctttttttttttttgagacgaagtctcgctctgttgccaggctggaatgcgctggctcgatctcggctcactgtaactgctgactccctggttcaagagattctcctgcctcaccctcccaagtagctgggattacaggcacataccactgtgcccagctaatttttgtatttttagtagagatggggtttcaccatgtttgccaggatggtctcagtctcctgacttgtgatccgctctcctcagcctcccgaagtgctgggattacaggtgtgagccaccgtgcctggcctacaaaggaatcttctaagtgtcattaacatttggaaattcatagggaggagactccagtagaaaaggaaactggtgggcagggtgcggtggctcacgtctgtaatcccagcactttggaagtctcagtcaagtggatcaccttaagtcaggagtttgagaccagccaggccaacgtggcgaaaccccgtgtctactaaaaataaaaaaattagccaggcatggtggcacgcacgtgtagtcccagctacttgggagactgaggcaggtgaattgcttgaaaccaggaggtagaggttgcagtgagccaggatcgtgccactgcactccaacggagcaagactccgtctcaaaaaaagaaaaagcaactggtaaggtaacagcatctagagatggtgttcttggggcagttctactgtttaaatttgttacaagttgcgtttgtggttgtatgtcctttgactttgaggcagatatacacaattattttgggagtgcctctaaaaatcaagtgaatgataaaaactggtgtcattactttatgtggcagtaagctaatgacttcgcccgcataccaagtttattggtgtttttcttttttcaattaaaaactttctttctttgcctttttggtggattatgcccaagagagtagagaatgtgtcacttacttggagttttacagggactatacagacacaaaacatatatccttcctctttaaatatgaattgatcctcccaaaagatagtttttgcaggtgataaatgacaagttattagagcacatgttttggagtttcttataatggttttgtagattttcctatgtttagggttagtgttttaacatttttagatggattttagtccattttacagatatcttaacggttgtgagaaagtatggttgagagtaataataattaaggcagtgagtgatgaatttagggagattgtattgcatctggattctactaattgtaactgtacaagttagttgactttctgtgcctcaatttttgtcttctttaaaacaaacataggctgggcatggtggctcacaactgtagttccagcactttgggaggccaagtcaggtagatggtttgagctcaggagttttagaccagcctagacaacatggtaaaaccccgtctctacaaaaaagcagaaaaattagctgccatggtggcacaaacctgtagtcctagctactggggagggtgaggtgagagtatcacttgagcccaggaggttgaaggtgcaccatgatcacagtggccgtgattgtaccactgcactccagcttgagcaacagagtgaaacgccatctcaaaaataataaaaattaaaataaaattagcagctgggtgcagtggctcatgcctgtaatcccagcactttgggaggccaaggcgggtggatcacctgaggtcagaagttcaagaccagcctggtcaacatggggaaaccccatctctactaaatatacaaaaattagctgggcgtggtggtgggtgcctataatcccaactactcaggaggctgaggcaggagaatcgcttgaacccaggaggaggcagaggttgcagtaaactgagatcgcgccattgcgctccagcctgggcaacaagagtgaaacttcgttcccaaaaaaacaacaacaaaaaaagaattacggtagaggccgggcatggtggctcatgcctgtaatcctagcactttgggaggctgaaatgggcagatcacatgaggccaggagtttgagaccagcctggccaacatggtgaaacccctctctactgaaaatacataaattagccaggcatggtggtgcacttctgtaatcccagctactcaggaggctgaggcatgagaattgctggaatctgggaggcagagtttgcagtgagctgagattgtgctactgcactcaagcctgggtgacagagtgagactctgtctcaaaagaaaagtattacggtagaacatcggcagatactacacttgatcttagtcaaaaggctgagacgtgatagaacatcattagaaatgaggtgttaataaactgaaacctctgccttaagggttttttaaggctgggcattgtggctcaagcctataattccaacactttgggaagccaaggcaggaggatcacttgagttcaggagttcaataccagcttgggcaacatagggaggcccatttataaaggctgagtgtggtggctcactcctctaatctcagcactttgggaggcggaggtgggtggatcacaaggtcaggagttcaagaccagcctggccaacatggtgataccccgtctctactaaaaatacaaaaattagccgggcttggtggcgtgtgcctgtaatcccagctactcaggaggctgaagcaggagaatcacttaacctgagaggtggaggttgcggtgagccaagattacgccatttgctctccagcctcggcaacagcaagactccatctcacaaaaaaaacaggccgggtgccatggctcacgcctgtaatcccagcactttgggaggccgaggcgggcggatcatgaggtcaggagattgagactatcctggctaacactgtgaaaccccatctctactaaaaaatacaaaaaatttagccgggcttgatggcgggcgcctgtagtcccagctacttgggaggctgaggcaggagaatggcgtgaaccgaggaggcggaacttgcagtgagccgagtttgcgccactgcactgcagcctgggcgacagagcgagactccatctcaaaaaaaagataatagtaaataaaaataaataaataaatataaaaacaaaataaaaaaattagctgggcgtagtgacacacctgcagtttcatctactcgggaggctgaggtgggaggatcacttgagcccaggaaggttgaaggctgcagtgagccatgatcatgccactgcacttcagcctgggtgacagagtgagactctgtctcgaaaaaaaaaagttttaaaaaagtcatatgcaatgctgcttttgcaaatgggaaaaaagcttttacggcttttatatcctatttttaacttgctatttacttatgcttatagttgtacaatcaaacatatattaaactactatgagagtataaagcagtaaaatagggggaaaatatttcaagttttattattgttctctttgatatttgaccatttaattacctgaaaatgtgaacttgctgtttataacctgaaaatgtggaagtatttgttgttatttctgtgtccgttttttctctcctaaaggagagactttctgttcctgcgcgcgtatgtgtatattttaaaagaacacaaaataaggctaagcacagtgtctcacagttcagcattttgggagactgaggtgggcggattgtttgagcccaggagttcaagactagcctgggcaacatggccaaaccctgtctctccaaagaatacaaatattagccatgcgtggtggcacacacctgtagtcccaggtactcaggtggatgaggcggggagggtcacctgagcctactagggaggttgaggctacagtgagacaagagtatgccactgcactccagcctgggcaacagagtgagaccctgtctcaaaaaaccgtgaaacataaatttacctttcaaacagtttttaagtgtacattataattttgttaactatatgcacattgttgtacaacagatctctagaactttttcatctcaactgaaactatacgcattgaacaacaccttttttctcccctcaccccctagcaaccacaattcttctttctgtttctgagtttaattattttagatagctcatataaatgggataatgtagcacttgaatttttgtgattggcttattttacttagccattatctaagacaatacttagataatgtctaagattcatctatgttgtagcatatgacaggattcccctctaaaagctgaataatgtcacaatactgtgacattatttaaaaatgggcagtgtcatagtatatgtgatattattcacttttcttttttctttttttttgagacagtctcgctctgttgcccaggcaggggtgcagtggcttgatctcggttcactgcaacctccgcctcccgagttcaagtgattctcctgcctcagcctcctgagtagctgggattacaggcacacaccaccacacctggctaatttttgtgtttttagtagagacagggtttcaccttgttggtcaggctggtcttgaactccagacctcaagtgatccattcgcctcggtctcccaaagtgctgggattaccgcacctggctattcacatttctttgtccattcatacattgatggacattgaaggttgctctcacatttcgcctgttgtcaataaatgctgcagtgaacatgagtgtgcaaatatctcttcaagatccttgctatcagttcttttggatatatacctagaagtgggattcctggatcgtatggtagttttattttgaagaacttccgtaccggtttccatagcagctgtaccgttttatattcctgccagcagtgcataagggttccaatttcttcacatcctcagtaacacttgttatttgttgttgttgttgttttgatagtggtcattctagttggtttaaggtgatatctcattgtgtttttgatgtgcattttcctgatgattagtgatgttgagcatcttttcatatgtttgctggccatttgtatataatctttggagaaatgtcgattcatgctttgcccatttatttatttacttttaagttattttatttttttgacaggatcttctttgttgcccaggctggagtgcagtggcatgatcacggctttgcccatttttaaattaagctattttttttgtgattgagttctagtggttctttatattctggctattaaccccttattcaatatatggtttgcaaatattttttcccattctttgggttgcctttttactctgttgatcatctttgctgtgccaacgtttttaagtttaatgcatagtcatgtgctatgtgatgacattttggtcagtgatagaccacatatatgacagtgggcccgtaagattataatggagcatactgcgttgcagatcaagtagaggaaatgattaatattcagtgatggtgctgggacatttggttttccatgtgaaaaaaatataaataaaaatatgtatactacctaggtttgtgtaagtacactctgatgttcgcacagcaacaaaatagctaacaatgcatttctcagaatgtgtcccattgttaagtgacacgactgtagtcttttttttttttttcaggcttaattcactttatttttcttgtataaaaaccctgtgttgtagccacagctggagcctgggtcctctgcatggagactctggtgtgggtcttgacgagatggtcagtgaattcctgacaggaagacttgatgaatacagtctccttccagaggtcgggggtcaggtagctgtaggtcttagagatggcatcaaaggtgtccttggtatagttacccagggcggcagtgtagcccctggctaaggtgtagcagtcatcaataccagccatcataagcagcttcttgggtacaggcactgagacgatgccagtgcctctgggcgtagggatgaggcgcaccagcacagagccgtggtggcctgtcggcttgcaagggatggtgtggggcttgctgatcttgttcccccagtagcctctgtgcacagggacaatagagagcttggccaggatgatggccccgtggatggcagtggccacctccttggagcacttaacacccagaccgatgtggccattgtagtccacgatggcaacaaacatcttgaacctggtgcgctggccggcacgggtctgcttctgcactggcataatcttcaaaacctcgtccttgagagaggcccccaggaaaaagttagtgatctcagattccttcatgggcagggagaagacatacatctcctccagggacttgatcttcatgtgcttgaccaggcggcccagcttggtgataggcatccactctttatcctcggccttgcctccatgagctctgcggcctcagccgcggcctcagccccagccccggccccggatgccactgccgaaacctccacggaagccactgcatttccccatcccaggcgatccccaccaccggctgccaccagcatcatctgccatttggtgttttctcagagaagcatctatttttgtttttgttgtgcatgtgtgcttttggtgtcatagccaggaaatcatcacttagtccagtgtcatgaagagtttcccctatgttttcttctagttttatggttttcagatgttaacatttagtttttaatccattttgtgttaatttttgtatatttttgcccatatttaaaactttagtgaaataacataatttaacattatttgtcagcattgttgcctctgtttaccaagtgggcttagagcctctaatgtaacatatatatatatatatatatatatatatatatatatttttttttttttttgagatggagtttcgctcttcttatgcaggctggagtgcagtggtgcgatcttggctcactgcaacctctgcctcccgggttcaagcaattctcctgcctcagcctcctgagtagctgggattacaggtgtatgccaccacatctggctaatatttgtatttttagtagagacggggtttcaccatgttggccaggctgatctcgaactcctgagctcagatgatccacccgcctttgcctcccaaagggctgggattacagacgtgagccaccgcgcccagcccatatcttcattttaagaaacattgttatctactattggtccagcaaaacgtgtgtgcatgaaacaaagatatggcagtagaagggtaaatactatagtaagaagtctaggccgggcgtggtggctgatgcttgtaatcccaacactttgggaggctgaggtggagggatcactttgaggtcagaagttcaagaccagcctggccaacatggtgaaaccccatctgcactaaaaacacaaaaatcagcccagtgtggtggtgggcgcatgcaatccctcctactcaggagtctgaggtacgagaattgcttgaacctggggggcggtggttgcagtgagccatgattgtcccgctgcactctagcttagtttaggcggacagatcctctgagttcaagagttcaagaccagcctggccaacttggcgaaaccctgtctctactaaaaaatacaaaaaatttgctgggtgtagtggtgggcgcctgtaatcccagcgactcgggagactgaggcaggagaatcgcttgaacccaggaggcagaggttacagtgagcctcgatggcgccactgcactccagcctgggcaacagagagagactctgtctcaaaaaaaaaaaaaaaaaaaaaaaaaaaaaaaatatatatatatgtgtgtgtgtgtgtgtgtgtgtgtgtgtgtgtgtatatgtatatatgtatatgtatatatatgtatatatatgtgtatatatatatatatagcataggcaacttaaaccatgccagagggaattgaaaatagggacctacaggagaaacaagaaagaatgaatactagttggctctactcaataggaagacccagggagaagttggaattaactcagatttccagcctgggtgactctgaatggctgtgaatggcagtgttcttattaacagggattgagaaggcacataggaatagaacagcattacccttggacagtgaatttaaggtgttgcctattggacatctgccatgtcttgtcacttttcgatatgggtctggccctcaggcaatagcagagatttgaatggagctgtagagtcacaagtcatctttatagacatgttagttgaagccatacgcatagatgagctcatctgggagatgaatttaaatcaaagagatcaaaatttccttgtttcacttaactaatcttcttagccatttactcttattgtgagcctggcttttccacctgaccaagttcttcttgttccaggaattcaaagataaagaaaccaggctctattatttctttctgattgattgatatttggtttctaaaagaaattttcttccttctctacattcacaaactcttctattcttttgccacattttatacacttaagtttaaaccagtttccatgtatattttgtctatattatgtttgttattgagaaataggcatttttgggaagaaagaatttggcattttggaaataatcagaaaattaaaaaatgcacacaccactttcccattcttctccccaccccaacccctacccctatcctcaaatgcttagctagtgaaatattaaaatgttgtaatagaaattggagtcaaggtctccttgctgaagagaccatctattttcagagactggaaggagagagaacaaaccaatcaagagtcattggtttgttgcctctattgttttatttctgacctgcgcaaatagcttttgaagtggagatatgctagttcttggcaactaatacttttctgggcatgcattttatgaaataataggtatgtatctgcctcattcttttaggctatgtgtttctctagtttaaaaataatttgccaatgaaggtctatctgtatttatgcaatccctaaatttgtatttaccttatgtgcgtatgttttaaatgtgtgtatggaggcttattttggatgctgtagatgggagagagtgccatcatctagtacactgttatatgccacaagaaataattgcacagccatttcttaattttaaggtttttcttttcaacaggttttgcactgattgcaaaaataaagtcctccgagcatacaatatccttattggtgaacttgactgcagcaaagaaaagggctactgtgctgcactttatgaaggcttgcggtgctgtccacatgaacgacacatacatgtttgctgtgaaacagacttcattgcacatcttttgggtcgtgctgagccagagttcgcaggagggtatgagtatgtaatttgctagaatgggctatctagcgctttgcttcattttattactgaaagtttattttcatcaccttctgcctcagtacatatgatatatgtataaattaaagtatgcctgtaaagattttgcttctctttaaagtatgcatttcttaattgactgaaaatagggaaaaactgttctctggtgtttggttcagtcctctgctagttcttgcttgaagggaggcaggcttttttggctttcattgttacagactatcattttcatttgaaaatgattagaagggatttttctccctctatccatgcattatcatgtgtaaattttattcacaataatggtttttgcataagtcagatctttgcagtaggggattaagaaatgccttattgaatgtaattcacgaactgtgtatattatattattattactacacagaaacctaaagtagtatctctggctttgttgtaaaaataaaatcagatgatgatgttaatagaataaatcaaatgcatttccttttgtatttagggtatcaaccctcatttgagtgcctactttctgctagaatacaaagggcttttttatcgccaaagttctgtgaacacttgtaaagactggcctggtggaggactcttgcccatgatgaatcactttggcattgcctttctcaattcctcctcaaaacaaaaaacctaaagaaggaaaaaatgttttgctataattggaaagtaaaaggaactgttgtgtctactatgagctggacacttctatgtgattgctttgtgccctaaaacccatctttttagagccagttcctgaattactttatttttagcaatacgaggactaaattctacttgcatgtgtatttctcattggttgtggacatgcatgcttgtatagcaacatatacgttgagtgtaaatgtataactgtcttgttactaggtaagcacattgtgtttaaaacctgaacttgcagctgtgttatccatcttttactgtttcagttaaaggtattagtgtgtgattattcccttttataggcgaagagaaaggcatgcaaagacaatagatatagctcaagaagaagttctgacctgcttgggaattcatctttatgaaagactgcatcgaatctggcagaagctacgggcagaagagcagacatggcagatgcttttctatcttggtgttgatgctttacgcaagagttttgaggtaagaacagtgggctgttccagtatctcagattgcttagtcacgttattggactgaatcttaatgtaagccaccagtgcctaaaaggactgtccatcactgatagagcttcatggatttggctggatattgttacatggctttgggttggagtgggggtggtctagggaactgggatttagaagaagttgatggatttaaaaaaatgtttttaatcctgttaactttgctagctttggtttttagactttctcagagtagaaaactgaagatgtttaataagatgctgctatgaaacataactagtgaggctgggcatggtggcttacgcctgtaatcccagcactttgggaggacgaggcaggcggatcacctgaggtcaggagtttgagaccagcctgaccaatatgatgaaaccccgtctctactaaaaatacaaaaattagctgggcgtggtggcgggcacctgtaatccagctacttgggaggctgagacaggagagttgcttcaacctgggaggtggaggttgcagtgagccaagatcacgtcactgcactccagcctgggcaacaagaacaaaactccgtctcaaaacaaaaacaaaaacaaaaacaaaacaaaaaaaacacacataactagtgaaaagttaaatgcccccaaggattaagcaggaaatgttaaaaccttcagtgagtttcattttgcctgctaatgtccagtagtatgaagtaaatgctgtgtgaatgccatggtataaggactatttttctttctttcttttcttttcttttctttttttttttttgagacggagcctcgctctgttacccaggctggagtgcagtggcatgatctcggctcactgcaagctccacctcctgggttcacaccattctcctggctcagcctcccgagtagctgggactgcaggcgcccgccaccacgctcggctaattttttgtgtatttttagtagagacagggtttcaccatgttagttaggatggtctcaatctcctgacctcgtgatccgctgcctgccttggcctcccaaagtgctgggattacaggcatgagccacggcgcccagcccttactcgttttctctttgtatttttgtaccttcagagactagatcatctaatcaggttaaatagttttttcattatgtcagtaaatggtatgtttacttttgttgtgttaaaattctgaaatttaggccagatatggtgtctcatgcctgtaatcccagcactttgggaggccaaggtgggcggatcacttgaggccaggagttcgagaccaacctggccatgatggcgaaaccctgtctctactaaatatacaaaaatcagccagtgtggtggcgcatgcctgtggtctcagctacttgagaggctgaggcaggagaatcgcttgaacctgggtggtagaggttgcagtgaactgagatggtgccactgtactccagcctgggcgatggagcaagactctgtctcaaaaaaaaaaaaaattctgaaatttaaaactagaatcttgctggtttggaataggagtgtgtatattaccacagaaaacaaagggaccgggcacggtggctcacgcctgtaatcccagcacttcgggaggctgaggcgggtggatcacgaggtcaggagatcgagaccatcctggctaacacggtgaaaccccgtctctactaaaaaatacaaaaaattagccgggcgtggtggcgggcacctgtagtcccagctacttaggaggctgaggcaggagaatggcgtgaacccaggaggtggagcttgcagtgagctgagatcatgccactgcactccagtctgggcgacagagcaagattccgtctcaaaaaaaaaagaaaagaagttctgaccaatattcaccctcaaccttatttttataatagatgaccgtggaaaaagtacagggtattagcagattggaacaactttgtgaggaattttcagaagaggaacgagtaagagaactcaagcaagaaaagaaacgccaaaaacggaagaatagacgaaaaaataagtgtgtgtgtgatattcctactcccttacaaacagcagatgaaaaggaagtaagccaagagaaggtaatatttcttaatatcaactcttaagtgtgtatgtattgcttgtagatagaagtacaggccaggtgtggtggctcacgcctgtgatcccagcactttgggaggcccagggtggaggtatcacttgagcctaggagtttgggaccagcctgggcaagatagtgagatctctatctctatttattttattttatttttttaataaaaataaaaagtacagtcgtcccttggtatctgtggggtttgattccaggacttcctgtagataccaaaatctgcagatgtgcaagtccctgatgtaaaatggtgtaatatttgcatatagtctatgcacatcctccttatacttttatttctgagacagggtctcactctgtcacccggactggagtgcagtggcacaatcatggctcactgcagcgttcatctcccaggctcatgtcatcttcccacctcagcttcccaagtggctggaactacaggcttaccccaccaggcccagctaattttttgtatttattgtagagatggcgttttaccatgttgttcaggctggtctccagcttgtgggctcaagcaattctcccacctcagcctcccaaaatgctacaattacaggcatgaaccaccgtgcctggcctcttgtattcttaaattatctctaaattataatacctaatgcaatgtaaaagctatgtaaggctgggcatggtggctcacgcctgtaatcccagctacttgggaggctgaggcatgagaatttcttgaacccaggaggcaaaggttgcagtgagccaagatcgctccactgcagtccagcctgggcgacagagtgaaactctctcaaaataaataaaaactgtttaaatagttgttatactgtattgtttagaaaataaggacaagaaaaaagtctgtacatgttcagtacagatgcaggttgattttttcccccccaaatattttcgattcttggttgaatttatggatgcagcacccacagatatggagggttaactgtatggctttttgctagatttgggcatttttactatgcttttccagatgtgagctcctgcagtttttatatcagcttttttcctactgtagtctgtataagccagaattttaatgtcatgtctatgttttattaagacaatgttgagtagttatctctttacctgactttaatgtattattagatcaaagtcaaaatatagaaagccacctctgtgcatgacctagagcagttctcaagtttttggtcttaggatccctttacattcttaaaaattaaggtactcaatgagcttttgtttatgtgggttatacttaccaatatttactgtattagaaattaaatgataaattttaagctactccttcaaaaataatgttaactaaatattttttcaaaaataactattttctaaataaaatgagagtgagaagaatggtattatactatatatattttttgcaaatatctttaatgttcatcttaaaaggaataagctagattccttttttttttgagacagagtctcgctctgttgccaggctggagtgcagtggcatgatctcggctcactgcaacctccgcctctcgggttcaagcaattctcctgcctcagccacccaagtagctggggctacaggcgtgtgccaccatgcccggctaatttttgtatttttagtagagacagggtttcaccatgttggccaggatggcctcgatctcttgacctcgtgatccgcccgcctcagcctcccaaagtgctgggattacaggtgtgagccaccgcgcctgacggaatatactagattcttatatctgcttctgcattcaatctgtttccatttattggcttggttgaagcatatgaagaaagtctagtctcacacagatattatatggtaggaaaagtattttattttggagcagagtcttgctctgtcacccatgctggattgcagtggcacaatcttggttcaccgtaacttcctcctcctgggttcaagcgatttttgtgcctcagcctcccaagtagctgggactacaggcgcctaccaccatgcccggctaatttttttttgtatttttagtagagatggggttttgccttgttgcccaggctggtctcgaactcctgagcttaggcagtctgcccgcttctgcctcccaaagtgctgggattacaggaataagccactgtgcctggctgggagcagtattttaatataaaccttttcagatagttgtggatattcttcaatactacactttgaccagtggtagtttctaaaagattcattgcaatatggaatctggcaccttatcaatgacctttttgtactctgttaaattagaatccgttggactatattggactttgaatagatcttttactcatgcattgttttgtaacatcatgcattggaatttatttcaaagttcactgaattatgcaggtcagaaaagtccaagtattaggaagcttcaagttcatagcactgctggttgcaaggccaaaattctgattgttgtttcaatgtttgagttttgtcattgacaacagttgttgttcattgtttcctttgaagtaacagattgacttcattcatttttgagaaaatgcctgctaaatatccaagtctctcagtttgtctctcatttattcgttcaagtgaacttgatgttccaggaaaaaagttcagcttgcacctcaaaaagtggcacaagtacgtttccttgagacagctgcaatagaaatgctttaagcatacttcccatttgtcacatacttttttttttttgagacggagtctcactctgtcgcccacagtggagtgcggtggtgtgatcttggctcactgcaggctctgccgtccgtgttcaagcaattctcctgcctcagcctcctgagtagctgggattacatgcgcctgccaccttgcccggctaatttttgtatttttagtagagacggggtctcaccatcttggctaggctggttttgaactcctgacctcaagtgatccacctgcttcagctgcccatagtgctgggattacaggcatgagccactgcacctggccccacatagactgtcaaaaagatttctgttgacagggcgtggaggctcatgcctgtaatcctagcactttgggaagccatggcagaaggattgcttaaggccaggagttcaagagttcaagactagcctgggcaacataacgaaaccctgtctctacaaaggaataaaaaaattaggcctggtggtgtgcttctgtagtcctagctacttgagaggctgaggcagaaggattgcttgagcccaggagtttgaggctgcagtaagccatgattgtatgactgtactctagcctaagtgacagagggagaccgtactcaaaaaaaaaaaaaaaggaaaaagtatatgtatttgtggttgatatctgatacaattaatatttttacagcttcctcagagacattcataagtgaaatatctttttgtgagagcgcttgacagttgaagaatacagtgattcttagcacactttggttagtactgtcttgatttgtgctaaggactaatatctttacccaccattacttttgtactgtcagtgtaaatgtcagtacagtgaaaatgccacatcttactattaggatgaaaatagttttgatctagggaataaaatgtagctgttatggagtaaagctcttgactctctcttaatgttgatccttaaaggaaacagacttcatagaaaatagcagctgcaaagcctgtggcagcactgaagatggtaatacttgtgtagaagtaattgttaccaatgaaaatacatcatgtacctgtcctagcagtggcaatcttttggggtcccctaaaataaagaaaggtaagtaaataatttctttttaaaatgaactcttaactctattctttcttactgttaaatgtaagagcttttagagattctgtgagctagaattttaaaactgctttatagttccaagaatatcatataatttagtcagatacttaatatttcctttttctttatgttctttgacttatttttgacaaaaacgaaaaatggtaaattcctaatcatattttcattatttaatttactttctacttaaaaaaaaaatccttcattggaaatgttctacttttaataagccattaattatgagatttttctgtggtccccaaagagttcactctttgtcctaatatacttattggtatgttaatagtaactctcacttgatttattctcaggcttatctccacactgtaatggtagtgattgtggatattcatctagcatggaagggagtgaaacaggttctcgggagggttcggatgttgcctgcactgaaggcatttgtaatcatgatgaacacggtaggctcacattaagtttcccagttatttctactacatggctgacttaagaacataaataagaaggattattgatttctgcaggtgatgactcttgtgttcatcactgtgaagacaaagaggatgatggtgatagttgtgttgaatgttgggcaaattctgaagagaacgacacaaaaggaaaaaataaaaagaagaagaagaaaagcaagatactgaaatgtgatgaacatgtaagtgtcataacttgtaattcttaaacctttgctgttgaggacagaacacgtgttttccttggagtggcatatgtgcagcttagctgctaggatttactttttttagaatgagttctttatgcagttccattgggtgctcatcgtgtgagagtgtgggttgggggcagagagagatgtgatcatttgtgcaacagtccttgtgagtcagaaattcaattgttctttttatacttttaaaattataagctgtgtaatcttaaacaatttgtttagtccctatcatattaggttctatgaaggtgaagtgaatgtatattggcaggtgtggcatagtgtctagtacatagtaagtgcctggtaaaataaaatgaatgccagctgctactattacttagtattccttctaaaggtttaatactatgtcaggatttttttgagatggagtctcactctgtcgcctatactagagtacagtggcataatcttggctcactgcaacctctgcctcccaggttcaaacaattctcctgcctcagcttcctgagtagctgggattacaggcgcatgccaccatggctggctaatttttgcatttttagtagagatggcatttgaccatgttggccaggctggtcttgaacacttgacctcaggtgatccacctgcctcggcctcccaaaatgttgagattgtaggcatgagccaccgtgccccgcttttttttttttttttttaaagaataattgctattatatcatgcctttttacctgtgaaatcctttgctgtggtatcagatccagaagcttggaagctgtattacagatccaggtaatcgagagacctcaggaaataccatgcacacagtgtttcaccgtgacaagaccaaagatacacatcctgaaagctgttgcagctctgaaaagggtgggcagccattgccttggtttgagcataggaaaaatgtaccacagtttgcagaacctacagaaacgttgtttggtcccgattccggaaaaggtgccaagagcttagttgaactccttgtaagtattccatgtggtcttactgtacataactgtttgggaacggggtggatgtgggaggggatagtatttgagggcttaaggtaggtagttgaaggaagcttatgagaaattaagggtagtatttcattattgtttggggacttcatttctgtccttccactcgtggtttatgcaactactctggaacacgtttccatggccgcctctgtctcagtagaagacattataggtattccttgagttacagtggggttacattccaataaacccattataactcaaaaatactgcgagttgaaaatacattcaacatcccaataaaccctttgtaaagttaaaaaaaaaaaatcccaaataaggctgggtgcagtggctcatgcttgtaatcccagcactttgggagaccgaggtgggtggatcatgaggtcaagagatcaagaccatcctggccaatatgatgaaaccccgtctctactaaaaatacaaaaattagctgggcatggtggcgtgtgccagtagtcccagctacccgggaggctaaggcaggagaatcacttgaagccaggaggcggaggtttcagtgagctgagatcgtgccactgcagtccagcctggcgacagagtgagactttgtctcaaaaaaaacctgagtagaaccattgaccattgttaagtcaggaccatctgtagttaggagaaaggatagaggtagcattgtattcagtagtctgcctccttgaagtaggttactgtaagcaaactttgcctttctgattggcaagttatggtagccacccttccataccagaaagaatatacaatttgaactagaggttgctttcttcttttaggtgtcatgtagggtaagactccagtcctgagactttttacctgatccccaactgacccagtgcgtagtataggtggcccttggaggaggggaggaagaagagtggtgtccttttcattagagtcctgatggaaccaaatccttcggaatactagcttttttctttttcttttttttgaggtggagttttgctctgttgcccaggctggagtgcgatggtgcgatctcggctaatcgcaacctccgcctcccaggttcaagcgattctctggcttcagcctcccgagtagctgggactacaggcttgtgccaccatgcctggctaattttgtatttttagtagagatgggtttctccatgttggtcaggctggtctcgaactcccaacctcaggtgatctgcccacctcagcctcccaaagtgctgggattacaggcgtgagccaccgcgcccagctagtttttttcttttttatggttgtaaagtttagttttaatatttatttattttttttttttgaggagtctcgctctgtcgcccaggctagatagagtgcagtggcacgatcttggctcactgtagcctctgcctccaaggttcaagtgattctcctgcctcagcctcccaaaatgctgggattacaggtgtgagccaccacctgtataagtttaatgtttaaaagttttaatggttgtaaaagtttacttcttaagtagaaaatggttatcttttacttagtttgtagagatgactgtttcaagataggactaactggagatacgtctggctacttaaaatatggtaactagttgtaacatctttaattagttattttttcaaggccaaggtatggtggtagtttgctaggctcataggcttctaggagaaattatagattcaaggtttcaactcaaggagttggattttattctcactactttcttaggcagaatgacatgatgcttattctgcaaacactccaattaaaggctttatgtgactgatgtgaaactaaaaagttagactggtttaatttttagctgtcctcctccattacataacattttgcattcttaagtcatagtcttaactactgctttaatttgcaggatgagtctgaatgtacttcagatgaggaaatctttatctcacaagatgaaatacagtcatttatggctaataaccagtctttctacagcaatagagaacaataccgacagcatctgaaggagaaatttaataaatactgccggttaaatgatcacaagaggcccatttgtagtggctggttgacaacggctggagcaaattaaataaataaaatagctctgtctttcaatgaaacactcacgatgactactgcgccttctctttcgaaaaactcttaatttagtgacttatggcaaaattttatcttaaatcaatgtgattctttcttgttttgggagacggtggaggtatcctcattagttctttcttcaggcttgtgtctttagttgcgtggctgcgcaggcctgccatatgatttaagccatctcttttcattaaatgtttctcttcctgtgagacttactaaagcaacttagtggcaaaaagtaatgttgtacttataattctgtacagaaatgacaatgagctgaatatatggttttacaaagtagacatccacttgcaaaatgtttggatgtaatgttaaagcgcaatgtgcaaaatttaaaataaagaatatttattaatacgcacagtaaaatttgctgtacatgtttctacttaatatgtggcagtactttagtatttgccacttgtggacttgatgcttggccagtgttgatgttagaaaggatgaaggacagagatacagattgttgaagacaaaaatcttcctttgatgagaattgacaactgagaaaagcagttttccagtctttttcttttgaggagatactttaaatacttgctaccatcttactttcccatgagactttaattgctattattaaaggttccctaatacataatacaaagtacttcttaaattcagaggttcatattgacctagaagaataaaaacaaaacttggcagaatttcaaccaagggttgcccgataagtaattgctcaacatgtaagactgggctcagaaggctgcactgagagctaaccacattgtgggctgtttaaatgcatgtgaggttcagccttatctggtatccagtaacaaagtcactgtggtcttacagtttactcctgtcacagctgtgagtactaaaggagagagttccccccaggagtagcattttgctgccatttaaaagatccagtcaaatagctccgtagacacatgatgcttagagatttgtgtctacatgtttataatacttggtggcagcataaaatcatgggacaatcagtacttctgtgcaatggaggtggagtgaattttatgtgcttttaatcagattttgagttagatttcaagtgggcagcagcagaaacttagattgaattttcatagtgccatttcttggatccacctcctgagttgtctttcaaatctaaatgttgtataggaatggggcagaggtaaaaggactcctcttggaccctttttgatttcatcccagaatctaaaaaatgactgtgggtctcccacagcccttggctcagaggtgaatcccctcttcaccactgttaagagtcaaatgttcttttgagatccctaaaaggaaaggctgatttagtttagttttaatctttgccattggggccaaacacaggataggcaaatgagtgtttttgaatgaataaaccagccacattcaccgcttactccattgcttgctggaagggagtcaggtggttattcaaagatgctttttctttaagagaatggctatattaagtacgcagttttcagcacttttagtaaagcgagctctactctgaacaaaaccagcaacccgagaagcgataatgatgtgaagacagttgaggagcacatccctggcgtaagactggactgcctgtggtccaaaccatgcttcaccacgtcagtatactcatctttaaaattaagatactaatatgtgccatctcagcgcggttgtgtagattagttactatatttaaaatgcctgctacaccataagcagcaaatgttagatactgttttaatctttggcatatatcatgatacatttgctacagtggggtaggggtaagcgtgggggtctagggcagttagacacagtgggccatttagggacagaataccccagtacacgtgtacttaggagtatttcagttctccgtggctagtaaagccaagggatcaggtagggtgaatgagtccttcccaaggtcacctagcattgatggcggagacactcggcgttttctgggccgaatcccttcccatcagccaccggcgggtttgggagggtgtggaagagtgttggagtcaccttaagtgcccttaattcctcatcctggcattagggttcaggagtagagaagggagactaagcgggacgcttcagtatgcgcccttggggctgaaggaacctccccgctaaacctcggtttccctgaccccaaagggcagcgctcactggggaagcggcgccgccagctgccaggacgctcccgcgcagcccggtttccctacgccggggcggggcagaggggcggaaggggcggggcggccgggccgcggcggcctccgactggatacggcggatcgccgggggcctgagggtggagtcccggccggaggcaggccgggactctggtgggtctaggcgcggatcggacccaagcaggtcggcggcggcggcaggagagcggccgggcgtcagctcctcgacccccgtgtcgggctagtccagcgaggcggacgggcggcgtgggcccatggccaggcccggcatggagcggtggcgcgaccggctggcgctggtgacgggggcctcggggggcatcggcgcggccgtggcccgggccctggtccagcagggactgaaggtggtgggctgcgcccgcactgtgggcaacatcgaggtgaggccgggccgagggcggggacgtcgcgggcgggtcgtttccccggagtcgggttcacctgcccgccacgccggggccctttgctctagtcggggcggcctctcggatcccttaaggcaggcttctcccttccccttaagtctcatctttgaaggagccgtttgccctgacagcccctgctcgagttaccgaatctccgaccccggcatctccccacccgcccctcgggtctccccagggtattggcccgaggaaggggaagccggaggtcgggggtggtggtctcgcccctgtggccttctcgcccccggcggccaagtgcctctaatctccagaagtcacccaccacgcagggcaaggtggctggccaaccagatgggcaggagccaggactgaggttggggttggggtgggagctttactgaagagcctcagccccgccccctcacctcgggggtaactcatgcccagtggcatgaggaatgaatggaatattcattagtgggccctcctccactctcctggggcgaacagagtgggtgaaatcgggcggaaaccttgagaggataaagcaacctggaactccttactctgctcttgacgtggggttgggagccctcagagctcagagaaaaatcaagatggccattttggagcagggaggaatttctgtgctaggctctctctggatgtgccctgtaagctcattctcagtgtcgggctagtgcttagctgcagggctttatctccaccgtgctcaaagtcctcaggcagggaaagggtaaggaggccttgggtgggggcagagggagaaggtatacaggaaggaggactgtcccctcccctgctgctgaccaaaggtatgctttataacccagataatcccaaggtcacctggctccatcactgccccactctttcctccctttatcctattctgaggagctcaggacccagccccagccttggagcccagaggatcaggccagggattaaacaactggattctgtaattctgaagccactcttgccttctcacctactcccctaccgcaagctagccaggaagggggggcctgagccccaaggggatccccaggctgatcactcagtcccagggtgactccatgtctgagaggagaatgcccctgttgtgagggggtgacatgatgttgtagatcattactgaggggaggtagggagatcaggtggcacaggtggggcaacaggaaggcagtgacagggagaaatacattctgagctcatcccttctggttttcttgtggcaggaattttgagtctagaggaggaagcgggaagatgtacaccaggggaggggaaagctgcagtcttccttgcccacagtctgctttgattgattcagtcattgatgttaaagcagaatttgggttctagcttcctacagagaaaactcctgtttcctgaagtgatcaaatgtgggtaaaatctggtgaaggggggtttctgattctcagaggactataccttttgaactcacagaaagtcaaagcagaaaagaatgtcccaagacacccgatcctgtcctttattcctggctcagcttgggaggaggaaggggctccaggccagggcagctggccaagctggccttcctctagggcaccgcacgccccttccccctcgcccacgtctacacagtcaccatcacaaggctcaagtgcccagtcactggcttccaaagaaggccacagaacgtattttcttcttgcctctgaatgtcagcttccccctgggctgcctctcagtggctctgccttctcaggtctttcttggcatgctgagggcctggagatgcacagggggtgttcaatggcacctgccacctgaattgcctcatagtctcctgagaaacctcagaggggagggtggtgcaccagggctcagagagaaagaatctgtcctgactttctgacccctcctttaggtagggagagaagattggcagctgggcttggttgaaaggcatgtctgagaactctgagccagttggctgcagtttgcgaggggaggggaatagttcagagatgagggactggctgacacaatgcagaagaagctgggttaaccagcccagtgactctcgggactggtgtagaagcatgaagtggtggagaggcgcatattacctatgggcagaagaggtgttcctgttgaggaagaggcagaaaagagagagcactccattctctaggtccctggcccctgttccacccaggacttgagtttatttatttatttatttatttatttgagacacagtcttgctctgtcacccaggctggagtgcagtggcgtgatctcagctcctgcaacctccgcctcctgggttcaagtgattcttgtgcctcagcctcccaagtagccaccacacccagctaatttttgtattttcagtagagatagggttccaccaagttagccaaggctggtctcaaactcctgacctcaactggtccacccgccttggccttccaaagtgttgggattacaggcatgagccaccacgcccagccaggacttgagtttatagtgaggtttctccattgataacagccttttcccttcatcactcggggagcactgtcatcccttagactttgaccaaagaggacagacttaggggatgggcagtccaacatcttcgtggctgaaagtcagctgccaaaggagcatgttttatgagtgtgacgggggtcggggtctgaggctggctagggagccgtgggagtgagctgctcaccccagtcagacccctgttgggtttcataggagctggctgctgaatgtaagagtgcaggctaccccgggactttgatcccctacagatgtgacctatcaaatgaagaggacatcctctccatgttctcagctatccgttctcagcacagcggtgtagacatctgcatcaacaatgctggcttggcccggcctgacaccctgctctcaggcagcaccagtggttggaaggacatgttcaatgtaagagctccaagcctccatcttccaggtggagggtggggaggagagaggggagccaggggtttgtgaaccagagtgctgctggggacgggacatctaggaagagggagcttcgggttcccacctggggcatcttgactctctcttggcttcttgccctaccagagggatagagagtggatgaatggccatatcagctcttctcttctttgagcccctggaggtagttctttttttttttttttttttttttttttgagatagagtcttgctttgtcacccaggctggagtgcagtggcatgatctctgctcactgcaacttccgcttcccaggttcaaacgattctcctgcttgagcctcctgagtagctggaattacaggcacccatcatcaatgcccatctaatttttttgtatttttagtagagacagggtttcaccttgttggccaggctggtctcaaactcctgatctcaggtgatctgcccatgttggcctcccaacgtgctgggattacaggcatgagccaccacgcccgacctgaaggtagttcttaaagtctagagtgatttccttgtgttagaagaaagattgttaggggagagaactgctgcctgttgaatgtttcccacttgtcagtcctgtgcctgggtgcttgggaacgtgatgttatgggaagaaaaggaagagagagacaagtgatgatattcttacctagcctcactagtaactatgtgactttaggcaggttggttaccttccttgagcttcagtcttgtcacaattaattgggatgaacacacctctatcatcaatatctggggtcacagctccaatgtcccctggggccaggtaggtacataaaggagtgagggaggttaggaggggtctgtggtgtgtgaggaagcacacagccactgctcaaatcctgcatagttgctctatggtggtgtgggcccagtgtggcctgatttgatgaaattttttttttttttgaggcgaagtcttgctctgtagttaccaggctggagtgcagtggcgtgatcttggctcactgcaacctccgccttctgggttcaagctattctcctgcctcagcctcctgagtagctgggactacaggcgggcaccaccatgcccagctaattttttttgtatttagtagagatggggtttcatcatgttggccaggatggtctgtatcgcctaacctcgtgatccgcctgccttggtctcccagagtgctgggattacaggtgtgagccaccacgcccagctgatcttatgatttctttgagagaagtggggagtctgattttatgtgacacccccccactcccattcactaaaatgacagctccatgagggcaagtattttatctgttttattctctggtatggcttgatcccataagcactgaaaagatagttattgaataaatgaaactttccagtacatgttggaagggtttttaaaatgttttgaaactgtgcacaggccaaacccaactttcaggacatgggttttcaacttctggatggtatgatggggtgatagtagggtataaaagtatcctgagaagttgaaagcagtgtgtgaatggggtgttcttttctccccacaatcctttcccatctgctgacagtagacttagcacctcacagatgcttgggcctggaaatgaagccatgaaaatgaagccctcagccttcttggagatcagagccatggtcctcacccacagcacatgggtctctaaacctggacctcaactcgcccatctgtaaaatgagggacttacattaaattcctacagctcctttcagcttgaacattatctgagtctattaggatcatcctatgaggcatcttctctttccctgcccctgataccctagacctgggagatttactcacctggtcccaggggatctatttctcccactctacctgccaggggctgagttctctgcctcacaagcccacattgccaagaagatgagaaacacggctggaaacctccctgtcctggcacccatctcttcctactgccatgaacaccaagacaggttcacaccaaaggtgttctgttcctcatggcaggctctgccacctgattaagagaaacatctaatctcctgctggttccctctcttcttaagaggagaggcctgaggacctgctgaaagctttatctctgcttgtcctccgggtgaggctaatgagtggggccaacgggtggggcagtgtaggcgctttacagcagacacgccttcagacctctgttccctgaagggtggggatgtgggggtcacctctgccagagggagtaggagtggcaagttacctgaccctctagagtctccgtgcctagtcttgtagatggaacccacgttaaaggaaggcatagaaaggagggtcaggccttctcttctccactcatctcaagggaggggatggggaaggagcagagagtagctgaggaaggtagggagaggctaggctgtgtgccggaggagagagatttgtaagccattttggtaaggattttgagcagtttaggagggagcagggccagagactgtcacagagaagagaagagtagggtatttgggggaagaaatggaaatgattccctatggaattagagggtctgtgctactgttcatagaggagatggccaagacagagtctcctgggtcaggagtgggtttgaagggtttccattcttgtttgcaggaacttggggggtcagccaggtgaggagctacctctgttatcaactgggggttgcggctttagggagaggggcatctcgtgtagaagacaagatgctctgtgcctgtggctggtctccggggggacctggacactgttttggaatgccacactgcccccttcccccctagcattctgtggctccatcacttgctcagttgggccggagtggagacacctcattgccctccctggcctgcaggtgaacgtgctggccctcagcatctgcacacgggaagcctaccagtccatgaaggagcggaatgtggacgatgggcacatcattaacatcaataggtgagggcaggtggccaatgggtaccactcacccaccaggctgggtaatgtgctgcagctcacctgacctctttggacctcagtttccttggtgggaaaatacagatttaatacctgaatggcacaattatggtgagggaaagaataatgttgtcaagtaccagcccctggttggctggaatgggcagcttagccccttccctctacagctgaagcctggggcctctcctgggactaagtgcctcgattcctcaggcctggggatgaaccccacctcatggcacaaagagtactatgtacagtgtctgccactggggagccccagtctgaggggggacatggcctctgcctgccttgagatgtcccaatagaaccgtatcagtgaacatacagattagatggagagaattctgacattctgcaccaccaggagagtgcattctgtcgtcagcttagggatgagttccaggaaaaggagggttttccaaagctgtttgaataaccaaaattagattagtgagctgtaggatggccagtagaggtcccctttagaagtcttcccgatgggcatctgggtggtggggctgaccgggtacggcaggagcaccactggtctccctggaacttcattctctcctctttccccttcctctccccacccagcatgtctggccaccgagtgttacccctgtctgtgacccacttctatagtgccaccaagtatgccgtcactgcgctgacagagggactgaggcaagagcttcgggaggcccagacccacatccgagccacggtgaggctgtggcctagccctggtgggcacagggtggcgcaggccctccccacccacacacaccgttcaggaagcccatgttcagaatgtgccgctcagagctcctgggagtggactgggcacagaactgggtgctgctgctccaggcatggccctatgcagcccttcatttcctcatttcactgatccaggagccaacgaccagacttagactttgagctgggagggggctgacctgagggaaagcaagggactgtgggaaaccaggtgcacagtggctggaaaccgggactctgggctcttctcttgaaggccgcatgatcgtgagcgagtcactgaacctccctaagcctcggccttctcacttgtgaaaaggagatgatgagcttttcagggacacttttttgtaaaacgtttacctgacatataggaaaggctctgtagatggtaggtatcattgtggtcactgccagtggcagcttcggagggaggaggccgctgccggatatcaggcagccatcactgtgaagctggggttctgtggcctccatcctctcccctcgacctccccaagacctggcaaagctcagcccctgagaaggccctctctgttggcccagtgcatctctccaggtgtggtggagacacaattcgccttcaaactccacgacaaggaccctgagaaggcagctgccacctatgagcaaatgaaggtggggcctccctctgagcctggtgaagccactgactccctaaatgaaggcagagggaagctcggccttcagactccactcttccagcctttgtggctcctcctggagggttggggtggatgtgtggatgccacagagaagctcagtggtgggagggaatttgagtccattctgtccttgtctcaacccattcccctggtgctctcagtgtctcaaacccgaggatgtggccgaggctgttatctacgtcctcagcacccccgcacacatccaggtgagtctggccctgactgtctactcactggaggaacccaaccagccccagaggaggggagcagggagccctgcagggccaggggagagtgtcacagctgcctcatgccttgtaccttccacagattggagacatccagatgaggcccacggagcaggtgacctagtgactgtgggagctcctccttccctccccacccttcatggcttgcctcctgcctctggattttaggtgttgatttctggatcacgggataccacttcctgtccacaccccgaccaggggctagaaaatttgtttgagatttttatatcatcttgtcaaattgcttcagttgtaaatgtgaaaaatgggctggggaaaggaggtggtgtccctaattgttttacttgttaacttgttcttgtgcccctgggcacttggcctttgtctgctctcagtgtcttccctttgacatgggaaaggagttgtggccaaaatccccatcttcttgcacctcaacgtctgtggctcagggctggggtggcagagggaggccttcaccttatatctgtgttgttatccagggctccagacttcctcctctgcctgccccactgcaccctctcccccttatctatctccttctcggctccccagcccagtcttggcttcttgtcccctcctggggtcatccctccactctgactctgactatggcagcagaacaccagggcctggcccagtggatttcatggtgatcattaaaaaagaaaaatcgcaaccaatctgccttggcttcaggagtgtctttccattctttccccttctctgtgatcaggggtgcttgtgtctcagaatttcttccaggtaggtcccaggtgggtggattgggggcctcactcatgggagtatggattaccttaggtagcaggaatgggtttgtttgggccttgaaaacatgtaggagtttgacaaagcgaagacaggtgtgcaaggctgagaggtctggaagagcatgcagtgctgtgcgaacagctcagaacttaagcacaggagcaaggagccagatggggctgaagaggcagctccttcctgccttcctggatcgctggggggctgagtgctgcgcaagagtctcgccattacctgtgggacgggggcgttagtgagcttgtcagcaggaacacgacaggctcagagtcacttaggaagagaatcagcggcccgggataggaagtgactgttggggtcctgctggctggtgatgggctagtgagaagttctgggaaaaatcaccagcgccgggatgtggggagggaggcaacaagactgaattggttgaccaggaaggccaacccatctccttaaagggcccttcactggtgcgtgggtgaatgcggtccccggcctcctgggacctcgaggaacacaggacgcagccggtagtacggccagctcagctcgccgctcctctagccttgagggaggcgctgtgggggacagcctggcagccacgcatgcgcaaaacaccgtcaggaaggggccggggaggggcgggctcccgaacccggaagcgagggacccacgtgggagcctgggagcgggtggtcgtagctcggtagtccagttgtgggtaatcggggctgtttgttcctgtccgagagagctcggcggagacggctgtcgagtacccttcacctcggtgttgggagcctgggagcgaactgcggcgcgggttaccgctcccggggacgcagcaaggggcatcgagtccctggcgggagctgcgccatggcattgctctcgaccgtccggggcgcgacctggggtcgcctcgtcacccgtcatttctcccatgcagcgcggcatggggagcggcctggtggggaggagctaagccgcttgctgctggatgacctggtgccgacctctcggctggagcttctgtttggcatgaccccgtgtctcctggctctgcaggccgcccgccgctctgtggcccggctcctgctccaggcgggtaaagctgggctgcaggggaagcgggccgagctgctccggatggccgaggcgcgggacattccagttctgcggcccagacggcagaaactggacacaatgtgccgctaccaggtccaccagggtgtctgcatggaggtgagcccgctgcggccccggccttggagagaggccggggaggcgagcccaggcgacgacccccagcagttgtggctcgtcctcgatgggatccaggatccccggaattttggggctgtgctgcgttccgcacacttcctcggagtggataaggtcatcaccagccggagaaacaggcacggacgtccctcattctctatgtgccccaacttggagacgcagccgagttcctaagcaccttggcccttgggtgatcccttagccagacttacctgtcccagaactctcatccccctagcccttgggagccctgggagggtagggagccgggcttgagatggcccagcctaatgcggggaacggggaaaccttgcagctgcccgctcactccagtagtcagcaagtccagcgcgggggctatggaggtgatggacgtgttctccactgatgacctcaccggatttttacaggtaatgaggggcaagaggggaaggaacagatgtgagcccagctcagcctcttcaaggggacgaagctagcccctggcgagggagagaaaggggcatgttggcaccgcttcctttggccttctaaatccctctggggatggaagggtcctggagtttttaaaacggcaaatggagcattagctgaattcttcctagcgttataccctttcctgcaccccttccccaggtatgcaccactttgcctcttctgtaagtcagcctcagtgtctatttgcctactaggtcgggcttcagtaaatgcattttgttcagctgtggggagctgcgtacaggagacctgagttcctcgaatagggcacagcttgaaaggatgtttgaacaagaagatctttatgccattagtatctagcaagagacaaaccttggaaacccctctcccatccgtttgtcttcagctgtgcttcccttgctggacacaaggaggcagtattgctctgcatatggaatcccctctgaccataccccccccaacccccaccccaactgcagggtgagaaatttccctcttaagaagggggagagctctgggacctgtctagaacaacgctgtccaataaaaatatggtgtgagaaacataggtagttttagcttttctagtagccacattgaaaagtaaagagatgacattttaaataaattgtgtccagtatatccaaaataatatcaatttaacatgtaatcattttaattattattaatattattaattttttgagagagtttcattcttattgcccaagctggagtgcagtggtgcaatattggctcactgcaacctctgcctcctgggttcaagtgattctcctgcttcagccttccaagtaactgggattataggcacacaccatgcccagctaattttttttttttgtatttagatggggtttcactatgttggtccggctgttcttgaactcgtgaccttaagcgatccactcgcctcggcctcccaaagtgctgggattataggcatgagccaccgcacctggcctttaaaaaatattattaatgaaatattttacattcctttaaaaaatgttttacatacaacacacctcgatttgaattagccacctttcaattgcttaatagccacatgtagctagtggctactatattgaacagcacatatctagaagcattttttggcttcacttttttgtagagagcccctttctccaagcctgataggagatgaggttcccactcatcacttccagcccctgaacaggtagcttctgaaaacacagaaacactgcagaacatccacttaagctccaggcatcacatctccctactgtcatcagcatctgacctggagagtgtcatccgcctgttgctgtggaagagctggaggtgccccaagcaggggcctgtgctggggccccatcccttcctgcgtactcagagacactgctgtagcaattttcctcctcttcctgcagcatccacttttctcttacactctcttcagcatgcaagcaaacattcccctctcacgctcttgatctcacaccagtcagctcttcctctcacactgaatcaaaggcttcatcaaggtcaccagtggcctccatgttgctgcattccagggtctgttctcaattcttttctgacttgacccatctgcagcagctggcacagttgaccactccttcctccttgaaacactatacctgctttccttctgcttcaccatgtcctctctgagagacatttttagtggttcttcctcaaccccctgacttccgagcattagcatttcccagattttagtcctcggatctcttttgttgttgttgttaagagatggggtcagctgggcacaatggctcacgcatgtaatcccagcactttgggaggctgaggcaggcagatcatgaggtcaggagatcaagaccatcctggctaacacggtgaaacaccatctctactaaaaatacaaaaaattagctgggtgtggtggttcgtgcctgtagtcccagctactcgggaggcggaggtaggagaatcgcttgaacccgggaggtggaggtggtagtgagccgagattgtgccactgcactccagcctgagtgacagagtgacgtgtcaaaaaaaaaaaagagatgaggtcttggccgggagcggttgttaagagatggggtcttggccaggcacggtggctcacgcctataatcctagaactttgggaggctgaggcaggtggatcacctgaggtcaggagttcgagaccaacctggccaaaatggtgaaaccctgtctctactaaaaatacaaaaattacctgggcatggtggcgggcacttgtaatcccagctgctcgggaggctgaggcagaagagttgcttgaatccaggaggcggaggttgcagtgagccgagatcacagcgttgcactccagcctgggcaataagagtgaaactctatctcaaaaaaaaaaaaaagagagagagagagagagagagatggggtcttgctgtgttgcccagcctggagtccagtggcacaatcacagctcagtatagcctccgaattcctgggctcaagccatcctcccacctcagcctcctgagtagttggagatacaggtgcacaccatctcacctaatttttttctttcttttttctttttctttttttttttgtagagatgaggtctcactttgttgcccaggctggtctcaaactcctggcttcaagaagtcctcctgccttagcctcccaaaatgctgggattacaggcgtgagccacctcacctggtcctggatctcttttctgtatatgttcatttcttgttggtctcatctagtctcatggctttaaatactatctgaattcaaattcccgcccaagtgtatactccagcctggaccttggttctgaattccagattcactcatctagttgcctactgcacagttgttgttattgttgttgttgttttgctgtcaggcgggcatttcaaacctaacatttctaaaactgagcgcttgttccttctggagcaactccatccctttggttgtttaggtcaaaaaccttggcatcatccttaactaaagttatttccgtattatcaccatttctgcctgtttccactgctaccactctggcccaagcaagtcaccatcatctgttgaccgttattgcagaaacttcccacctggcctcctttcttctgctcttggctctcagcacagcaggcagagtgattctgttgaagtcataccatgttacttctctgctcaaaacctttcaaagcctctgtaccgctcagattcaaaggcagagtccttccagtagccctggagaccatacctcatgtggctcttgttccttcttctgtcttgacgcctctcttcccactggccaccttactgttctcaaacatgccagggaggcacctgcctctgtgcttgctgatctctctgcctagaatgttcttgccccagatgtctgcacggtgctcctccttctccttcaggtctgcactcaaatgtcacctcagtgagtccatccccacctgcccttccacaaggctgggattttggtctgttttgttttgttcagtgccctgtcctcagtgcctagaacagagcccatgctaggtgcttaataactattgactaattgactggatcagcagataaatgaatgtatgggcaaggctgggctcttccttggccagggctctgatggataatttttttttttttttttgagatgggggtctcactctgtcacccaagcaggagtgcagtggcgcaatcttagctcgctgcaatgtctgcctcctggtctcaagagatcctcgtgtctcctgagtagctgggattacaggctgatttttgtatttttagtagagacagagtttcaccatgatgctcaggctagtcttttttttttttttgagacagagtggagtctcgctttgttgcccaggctggaggcagtggtgtgctctcagctcactgcaacctccgcctcccgggttcaagcgattctcctccctcagactcccaaatagctgggactacaggcatgtgccaccacacccagctaattttttgtgtgtttttagtagagacggagtttcaccatgttagccagggtggtctcaaactcctgacctcaggtgatccgcccgcctcggcctcccaaagtgctgggattacaggcgtgagctactgcgcctggttttttgtttttttttttaatttgagatggagtttcactcttgctgcccaggctggagtacaatggcgcaatctcggttgactgcagcctctgcctcccgagttcaagcgattctcctgcctcagcctcctgagtagctgggattacaggcatgcaccaccatgcccggctaattttgtatttttagtagagacggggtttctccatgttgttcagactggtctcgaactcccaacctcaggtgatccccctgccttggcctcccaaagtgctggggattacaggcgtgagccaccgtgcctgggccaggctagttttgaactcctgacctcaggtaatctgcctgcttcagcctcccaaagtgctggaattacaggcttgagccactgcatacagcctctgatgaagatttgatgaattagaataggagaggcaggcatggtggctgacgcttgtaatcctagcactctgggaggccaaggtgggaggatcgcttgaagccaggagttccagaccaaccagggcaacatggcaaaacctcatctcaaaaaaaaaaatgcaaaaactagccgggtggggtggcgagtgcctgtagtcccagctacttgggaggctgaggtgggaggatcaccagaacccaggcggttgaggctgcggtgagctgtgatcgtgccactgcactccagcctgagcgagagtaagaccctatctcaaaattaaaataaaaaaagaattagaacatatcttcttccccctttcagaccaaagcccagcagggctggctcgtggccggcacggtgggctgcccaagcacagaggatccccagtcctccgagatccccatcatgagttgcttggagttcctctgggaacggcctactctccttgtgctgggtaggtggatgtccctgcgtttgtgcccagattacatttcccgagcaactgggtgtccagctgggcaaccctaaccctcagccccacgccctgcagggaatgagggctcaggtctatcccaggaggtgcaggcctcctgccagcttctcctcaccatcctgccccggcgccagctgcctcctggacttgagtccttgaacgtctctgtggctgcaggtgagtctactcccctttccctttcctctatccctctaatcacgcaggtgggatttgatgccctctaatcccatttgctggctgtttgtgtgcctcagttgctttatgtacaaaatggggaaattacatcccgttgatgagatgaggggctgcctgaatgtctaggtctctaaacatcatccttctcctccgtcctctcttcccttgtccttgtgtctgtgcaggaattcttcttcactccatttgcagccagaggaagggtttccccacagagggggagagaaggcagcttctccaagacccccaagaaccctcagccaggtctgaagggctcagcatggctcagcacccagggctgtcttcaggcccagagaaagagaggcaaaatgagggctgacgtggactgtccacagtgttcatgtgctggagtcagggacggccgcacctgcctccgccggctccagtgtgcggggagcctctgcctgagtgtgcaccaggcccatgtttattgaccacagtctgggggggggggaaggggactgcggtggacaccagaggaagctgtttcctgttgtgatgttggacctgtagtaggacatggtgatttgttaatttccatgggaagccatgatggcctagcatggagggaatctgttcccaggccctgcctggaagttgagggaaagtttagacatctgcagagaggcaggcagcccagcccaggggacccgttcctcttgaaccagtcattgcctgtggcaaatgtgtgtatgagaatgtggggggtggagggcggggccctgatgtggagtagacagtgcgcacctcaggcccacacacggccccgccctggggccttgagcgcaggcctcatctttctgtgccgcgggactccgcacctacctcacagggttgttgtgaggctcaaataaaacatcactcagcacgtgggagattctggccaattcctccgttaggtggcagcctcgctcttcggtccagtcttcaggcagcttccacagcctccttgcggggagactcctggctgcagccccatgagaggcgacgggaaattagcaaacacctcccaccccacgggggccccccacgggtgactgagtcagttcccttcaaggggaggaactgggagcaggcttgccgttgattgtacaaccgagacagatttggcactcctcccctcgggtcccaggaaagcagcaggagccagcagtgtgaggagcatagaagtgtttctgtcctggtggcacattggaaccacctggcatgctttaaaaaacccaacactgacaccagagagtctgacatgatgggtgtggcgccacctggcatccggctttcgaaagcgccaccattggtctaatgtgcagccaaggctgagaatcaccactagggcaggtggactcaaattccacacccttgacattttgggccagataattttttgttgtgagagccatcctgtgcactgtaggatgtttagcagaatccccgacctatacgcactagatgcctgtagcatgacctctcattatgaaaccagaaatgtctccagacgttgccagatggcttctaagagacaaaaatctcccctcctggagcatggctttggaggatagcaaccccgaacttgcaatcctgactgctatgtgaccttgggggggcgctccttacccacctgggcctcggtgccctcctgggcgaaaggggaataatcctaccttcctggattgttgggagaatatggagggcaataggaactcacatgtattaggtgctcaataaatagtactccacttttctctggaatccatctgcattggatttgtctcaattctaataatggcaatgccaatttagagcaacacttaaagttgtttaaaaagggcctatgctcctttttttttgagacagggtctcactctgtcgctcaggctggagtgcagtggcgcgatcttggctcactgcatcctctgcctcccaggttcaagtgattctcctgcctcagccttccaagtggctgggactacaggcgtgcaccacgcgcagctaatttttatattttttttttggtagagatggggtttcactgtgttggccaagctggtctcaaactcctggcctcaggtgatctgccctcctcagcctcccaaagtgctggcattacaggtgtgaacctggcctaaaaagggcctaagatctttttttttttttgagacggagtctcgctctgttgcccaggctggagtgcagtggcgcgatctcggctcactgaaagctctgccttccgagttcatgccactctcttgcctcagcctcctgagtagctgggactacaggcgcccgccaccaagcctggctaattttttgtgtttttcatagagacggggtttcaccgtgttagccaggatggtctcgatctcctgacctcgtgattcacctgcctcggcctcccaatgtgctgggattacaggcgtgagccactgcgcccggcctaagatctttttaaagtcaaagttactcctctcaagaaagaggacagaattccttcataaactgcactgatcagcttctgccccccttgagctccctgtccctgactgccacgcaggctctgacccatccctgcttcattcttggccaagtgcctagtgtagtgatgtttcactttggcttgtcattggggtcaaggaggagaatatttttaatatttcagaagcccagaggcacctgactgattaaatcagaatctctggagaaggagccatgtgttggtttttattttttctttttttgagacggagtcttgctctgttgcccagactggagtgcagtggcacaatcccagctcactgcaacctctggctcctgggttcaagcggttctcctgcctcagcctcccaagtagctgggattacaggtatgtgccaccacacccagctaagttttgtatttttagtagagatggggtttctccatgttggccaggctggtctcaaattccctgacctcaggtgatctgcccgccttggcctcccacagtgctgggattacaggcgtgcactaccatgcccagccgatatttcttaaagctactagttgatctcattgtgtgaccaggttcaagaatcagtggcctttgagccactcactcatgtccaagaaactgcttcccatgcacacctgtgcttttgagctcatgcctgaaagtttaggtgagggtgagctttcatctgtccctcaggttccggaaggtgctcattccagtcctggctccatggctttccacttagatggcttctcagcctcctcatcttggggatagtaccattactaccagccctatctacccccttccttttcaacagaagttataaaaataaaatgagagtatcggtaaaagatgttctgtaaaccagaggacactgcaccccaggactagcgcacaataatacagactttgatgtggtggttaattttgtgtatcaacttgactgggccatgggttgcccagatgtttggtcaaacattctgggtgtttctctgaggctgtttttggaagagattaacgtttacattggtagactgagtcaagcagacccctaatgtgagtgggtctcatccattcagttgagggcctgaatagaacaaaaagtctgacctctcccaagtcagagaatccttcctaccttcagactagacctgaaatatcagctcttcctggatctcaagcgtgctggcctttgaatggaaatgataccattggttttcctggtgctcaggccttcaaactcaggctggaatgaaaccatcagctctcctgggcgtccagcttgctgactcaccctgcacgtcttgagacttgcccgcctccatcattgcatgagccaatgccttataatctcttgaacacacgcacagttgtttctgtttctctggagaaacctaatgcagttgatgaaaatgaatgtaggcgtcccagtgctccctgcatatgggatgcagggttcagcttgctctctagaaccaagcccaacatggaatttagaagttggagtaggggctacttaggcaccccaccccccacagactcctccatggtggctggaacccgatctaacctgccctggacatgctgttcatcagctttccctgtcccagtggtctgggccatctagaagactctcctgggcttagtcaggtacagggggcttctccctgcttcactccctgggcagcaggctggctggcctctgggaagacaggttcacttaaaccaaaggggattgaggcttaaattacaggccatacacacacaggtgtgtgctaatttctggtatacaggcagtcccccaacaaagaggaagggtctgaggtcctaaggatgaggaggatgaggcctgattctcctttaggcagcctctggtacctggcgcggtgcctatacactgagtggacactgctcagcaagtgtgggttaagtacacgggagctggggaggctgtggctgtgggtgtgaaggggctgggtgggggtccatcccctgcagggcaaagttggaatgaagtcagaggagagagcagtggtggttaagagcaggagcctggctgctagacagtgcttgctttgagttccaactctgtggcttgctagaagtataaatgtggacatgtcccttaaattccaagcctcagttttcatcgcctataaaatggggatgacagtggtgtccacttcaaaggatggtggtatggattgaaagaggtcatacatgtaaaaccctcagccccatgcctggaggagcatggtagctgctcctcaaagcctctagggccagatttagaggtcagggtgctgggttgtgcttcccaaccaacctggcctccgttttcctgtaggctctggcccctttcatctgcagtgcacaatgatttaccactgggaactgctggagggagttgagggaggagaggggttggaatgacatttgtaggatccccctttgtcagggctccaagatcctgagatgccgagatggaaagggtctaagaagaattggcagtgacttggtattctcggagcagctaaatcaaggctggcaccccagatccctgctgcaggcctggaatatttttttggcaggaggctaaattgtcaatccccctccccctaggttggggtcctgaattagacagcacacctcccacccccgctttgccgacacacatacacacacaccaccactaccaccaccgactcctgcagggccaggtgccagggatccccacagtttgtaaatgtaatcaaccttgaggtttctcacttccacaggtgcaattagcatgcccatctgctaatccctgattaatggtgtttacaaacatggggctccactgcagagccgctcagccactccctcctggggttttgaggcaggggtcttccctgcaacctctccccacttcttcaggcctcctccccagccagaacccctctgcctccccttccccaggcagtgaacagagctagaggtccctcctcctccttccccgagcttcctggccccttctcagtgtacacatgtggaagcggagagcagggaaagcagacagggaggcttggcggcaaggccaggatcctactcatccctgtcccaccgactcagtctaccagtgtctttcttcccaattctgaacttcaaggatgtgtactgggcgcgctgcctttattcaccactcagctgcagccctgaggccacacaaacatgtccccctgcaggagttctcggtgggtcagaagtccggtaccaaaagcaggatgtcagacagtgccggctccacatgtgggccctaccttaggcaagtcacttaccctgattgagcctcagtttcttaatctgcaaaatggagataagaatactacctaccatgtaggcttaaggtttgtatgtgaggattaatgatgggatacatgaaaaagacttagcacagtgcccgggacacagtaggtgttcaataaatgtgagcttttcaatgcgatgatgacgatgacaatgatgacgatgatgatgaaaagaggcttttgaagctaaaaaaaaatgcccaagaacgcctcctcctcccctcaccctgctctctggggggaagggcaagtcccagctcattactggtgggggctgcgtagggggaggtgtcagattggaatcactcctgggtctgtttgcagcttccctgtttcattaacacctccctagtggtcttcagctcatcctgctgggggaggtgctccagaaagttctaacggcctcctacccagcccagagctcagtgcctctcacttctgggcctgtgcgccaggtgacatagaggcagttttatgttggccgctgaccagaggttgtcactgtccccctctcctgagggtcctggaaacctggtcaggggacgaagcacctggagcggatccttccttttatcctcttccctcaacctctaatccataggttttaatcccccatctcctgggcaccccaacatggccactttcccttccttcagaatccccctgtgaacagggcgcagtctcaggttcccatcccacccatctcttgctagctggatgcccaaggcaagatgcttgtcctctaggacatttagttgtctcttctgtaaaatgaggatgtcatacctcacagggggttagcacagtgcccagtaaattgtaaactctcaataattgtagttattttatgggcaaataaaatatttatttgctcaaatattgtagttattttatgggcaaaacaactgctctcaaaactatgttcttaaatcgcagaactgtatgtagcccattgggggtgggtggaaggggagcagggccagagccctgaggaccattagcacctccagagaagctggaaagggctcgagctctgcctcccagttaattggctcagctccttccccagattgggaaagggagaggggctgctctttgaatcaggaccaggagatttctacctcaggctctgcaaaggctgctttgaaacaggactcctcctgactgcactccaaggatttttatggaaatgcctgtccttcgcccctgccatgtgccctctcggtcacagtattccatttcagaggacacccttcaccagctgctgtgggccggggaggaggggctgggcctgtctttctcctgccctctctgcagtctggcccttctcccccttcgggctccagctttcttggtaaggtttgtaggcatcagaagggagattccatgagaagcagtacctttgtggtttatctgcaacctgagaaaaaaatccatgggctggcgggcgcggtggctcatgcctgtaatctcagcgctttgggaggccgaggtgggcgaatcatgaggtcaggagtttgagaccagcctgaccaacatggagaaaccccatctctactataaatacaaaaattagctgggcatgatggcaggcgcctataatcccagctactcaggaggctgaggcaggagaatccctggaacccagtaggcggaggttacggtgagctgagatcgcgctattgcactccagcctgggcaacaagagcaaaactccgtctcaaaaaaaaaaaaaaattcatgggctaaacagctccccttagaaagaggaaactaagccaggcgtggtggctcatgcctgtaatcccagtactttgggaggccgaggcaggtggatcacctgaggtcagaagttcaagaccagcctggtcaacatagtgaaacttcatctctactaaaaatacaaaaattagctgggcatggtgcattcctgtaatcccagctactcgggaggctgaggcaggagaatcacttgaacctgggaggcagaggttgcagtgagctgagatcacgccactgcactccagcctgggcgacagagtgagactgtctcaaacaacaacaacaacaacaacaacaacgacaacaaaactttcttgcaggccgcctgctccctacaaccgcagacacataagcccctcccgccctctaggaatatccctgccccacttagaccttcaagcaggaatcacccttactgattttgtattcccaggtcccaccacagggccaggcacgtgctgggtgtttcacaatgatgcatgaacaagtgaataagtcctgaggttggaggctgattgcctcctcttcctcttctctgaagtgggctggaggggcagatccctgagcacgcctccagccggccttgaccttccactttcaagcagtgtcagaggaggcaagtcagaaatcatccccagccacagctggtcttgcttctctgaaacaagggagctaattgaggctgaggagatgcttcacagcctccctcagcccctcagctctgcagagacccacctgtgccagactttccgtcgacagccccttgcatagatacaggtattagcctgggtcaggcactgtgcatggggctggatcttgtctgaatcagagccctgaggccgacacacactcttaacaacagtctcgcttcagtgagtgtgcgacctggaagccgtgtgcttggaacaggaggaggagtgatgtggtgatgatgatggtactagcatttgttatgcacttaccatgggcttacatgcctcatcttgtttcccttaccatactttttgtttgtttgtttgttttcttttatagacagggtcttgctctgttgcccaggctggagtgcagtgatgcaatcatagctcactgcagcctccaactccgggctcaagtgatcctcccacctcagcctcctgagtagcctccttagccactatgcccagctgattaaaaacgtttttgttgttgttgagatgggatctccctatgttgcccaggctggccttgaactcctgagctcaagtgatcctcctgcctcggcctcccgagtagctgggattacaggcatgaaccaccgcccaggctttccgagctaccttgacaagctctaagtgggacattccagtggaggtgctgggaggcacctccatccagtttcccactggctttaggtggtgttccaggctggaagcccagaagtgacagctcagagctactgtggggtgctgcaaagagccttggccccacagagactccagacatgggttcaaatcctggctctgctcccagatttgaaggctcaggcctggggtgagtttcttaacctctgagcttagtttcctccctgtaagatagagccaataactgctttcacccacggttgtgctgggaggcttgagagatgatgcccttggcatatggtagaccttcaataacccttccttcctttccgtctttttttttttttttttgagacggaatctcgctctgttacccaggctggagtgcggtgtcctgatctctgctcactgcaacctccgcctcccaggttcaagtgattctcctgcctcagcctcccgagtagctgggattacaggctcccaccacaaccacacctgtctaatttttgtattttgagtagaggcggggtttcaccatgttggccaggctggtctcgaactcctgacctcaagtgatccacccgctttggcttcccaaagtgctgggattacagtcatgagccactgcgcctggccaacccttcctatcttgcctcttccttcttctcagcagcctccctctgtgtctgcccctttgcccttcctagcctggggtctggcttctcctcccccttcacctctgcctctggtttctgatgagctctgtcctgtctgcctgccctggccgggtcactgggggctctttgctgttgctccctctctgaggctgtgtccgcacaccatgcctggtcctctccttccctctccccaccggcttcctgtgccctcggggctgatcgatagcagccgctggttatcgattggggtgggtgttcaagtgtgactgctgcaggctgatattgatgggcagaattggtgctgaggtcccagtggagcagcagctgggcagcctggggctttagggggaagtggggttctccccccacacttgaggggacctgggagtgggagtccttgaggggacctgggagtgtgagtccttaaggggacctgggagtgggagtccttaagggggcagacaccacaatgatgaaatttggggctgggggcagagggcctctaaggacagaacgccaaggcttagcttaggctgtcattcatcaagtatttattgagcacctactctgtgccagctggggatatagcagtgagcaagtcagcgacaaccaataagtaaaattatatagtatgttgtaagaaaagtagagcaggggaaggggacatagagccccgtggttgggggagggcacaattttaaacagggggactgtaaacaaagacctggagaaagggcagaagtgagtccctgagagcatttcaagcagtggaaactctaagtgcaaaggcttctgggtaggagtgtgcctggtgtgctctaggccagcgtggctggagagaggtaaggagggaggacagtgagaggaaatgggacagacggagaggtcacggaaatagaggctgggtgccactgggagcggacagcccagggctggaagctgcccaactccaacctgcgcagcctccgtacaagggtagcttccagaacatggttccagagccaactgaccaggtcccagacacttcacctgctttgtcgatgagatcgtgtgaattaggttctatcattaccctgttgtaaagctggggagactgaggcttagagacatttgacaacttgccccaggccatgtgacagagctggaactcaaacccaagtctgactccagaattgtggcttttgttgttattgtcttagctgtttttaagtgtaccagtcagtagtgttaagtatattcacattgctgtgcaacagctctgcagagctcttttgccttacaaaacggaaactctaccctttaaaccgcagctccccatccaccacccagcccttggcaaacaccattctctgttctgtttctatgaattggatgactttagataccccatagagtggaatcatacagcatttgtctttttgtgactggcttattttagcatcatgtcttcaaggtttgtccatattgtggcatgtgacagaatttccttcctttttaagactgaataatatttcattgtctgtgtacaccacattttgtttatccatccatccatcgatgggcacctgggttgcttctgcctcttggcttttttgaataatgctgctaggaacatgggtgtgcaaatatcgcttcaagaccctgccttgggccaggtgcagtggctcatgcctgtaatcctagcactttggaaggccaaggtggatggataacttgaggtcaggggttcaagaccagcctggccaacatggcaaaaccccatctctactaaaaatacaaaaattagccaggtgtggtagcgcatgcctgtaatcccagctacttggaaagctgaggcaggagaattgcttgaacctaggaggcggaggttgcagtgagccaagatcgcaccactgcactctagcctgggcgacagagtgagtctcaaaaagaaaaaaaaaaaaagacgctgccttcagttctttcgaatatatacccagaagtgggattgctgatccgattataattctatttttaattttgtgaggaattgcatactgttttccatagaagctgcaccattttacactgcccccaagagtgctcaagggttccagtttctccacatcctcaataagactgtttattttctgtctttctgatggtggccatcataatggatgcgaggcggcatctccttgtggttttgatttacgtttttccggtcatttgtgatgtcgggcatcttttcataggcttgctggccacttgtgtgtcgtctttggagaaatgtccattcgtgctctttgttcatttttacatcaggttgtttacttttttgctattgagttgtaggagttccttatatattctgaatattaacctcttatcagttataagatttgctagtattctctcccattgtgtaggtggccttttcactctgcgggttgtattcctggatgcacagtttacattttgatgtaatcctatttttctacttctgcttttgttacctgtgcttttgatgtcataagaaatcattgccaaaccactcctttatgctgtcaataattctgcctttgggtgggtgggagggaatggtcagggactattgcaacagttgagggaatgatgacgtgtttagccaggagcatggaagcccccaggtggtgggaaggcagtgattgtggtattccagttacagaggggctttcgtggagcagagtgatgacccagaaggcagaaacaggaccagtaggaggcccagggaggcaaaaagcagctcaatctagcaagattccagaagtggaagaggataccttggaggtagtgagctccctgtcactagagttgtgcgagacctcagttgatcactcagaatatttcacaggggcttcagacagaagatatgtttggggttgatggcctctgatcccttctatgattccataaggaaggagggagctcaaaggttcagccagcagggtgggatggacggggctgcagctgataggtatgccctcctctgtgcctggggaagtcttgtgctttgaagcctagctgtgcaggagattcccttaagttgccatcaccctggagcctgaacccaagccctggcccaacccatccataggtcttggagacctggactggaagagaggaagagagactaagatgtgcctccatcgcctgccaggtgctgcttgcaggcagaacggaagaaacagactttagaatctggtggaccttggttcagttgctgcctcagccattggctgagtggctttgggcaatttctttaatgtctctgatcctaattttcttcatctgggagcaaggggttgtcacctctcttgtggggtttcctgcagaataacaataacaggggcctggagcctggcaggtgctcagttaactgcactgatcagaattaagctccttacaattttccttttagcacccttggaagccaaggacccaagccagccacacccccaacataccccatcctgtgactgctccccatggcttggtccctgccagcctcataacctggatgaacctcagccttttatctcctactgagggctgggagtgcagactccgcatctagaacccaacagggccacagtatacacccaagccagctcagggcccctctcttgttctgacaggtggggctaagtgacggcctgacactgacatcctgcctgtctgtctatcctctgcctcttcctgtccctgtagctgctgaccctggtgtttccccactcccggcttcccagtccctctcagccctgcaccttgtgcccctgctcacttccttgcacattgcacccagagatccccccacaaccaccagcccagcccattgtggagaaaaaatcaaatctcattaaaggccatcgattttcttccaaatttgctgtgagtacactttgaggctcttctgtattcctgcctgctcccacctcagcccctcaactacccctgcagctacgccggggaaacaggggtgtcagggttggcaggtggcatggagggcaagggggcccccagccccccttggcccttcaatgtggcaagaccctgggtatgtcactgatttctggggagggagtatttccccgtctgtctatccccgtcttcctacagggcttgggctgtgtgttgcattgtgtatctgtctgtgtgtcagtttgtgttttgtgtgtatctctgtggtgtgtctctgtgcatctgtgtctttccatttctgcatctgtgcatctgcctctgtgtgtacaggtgtgtttgcgtgactgcagggggcatggggggctgggcttgcagttgaactctggatgctctgctgcccatgagatagccagcctggggaaggggcttgacttgggataaacccaagatatgattctcctccaccaggggccagaggctgggctgggatctgaaaagggcacaggcttccctgctgcctcctgccccctcctgtccctatggaaatgggacaccctgctgatttccttgcgatgttagatttggggttttgggggctggtggaagagacttcagactgggcgtggtggctcacacctgtaatcccagtactttgggaggccgaggtgtgtggatcacctgaggtcagaagttcaagaccagcctgggcaacatggtgaaaccccatctctactaaaaatacaaaaattagctgggcatggtggtgcgcacctgtaatcccagctactcaggaggctgagacaggataatcacttgaacccaggaggcagaggttgcagtgagctgagatcaagccactggactctagcctgggcaacagagcaagactccgtctcaaaaaaaaaaaaaaaaaattcaaacctcatatgggggcatcatttcaaacctgatgtcggattccttcatcccctaatctgaactaaagggtcccaggtgggggacagttagagttggatggacatatacttgcctggtgagtctggagagagcggactaagagagaaggctgggcagtggcggtgccctgcaggggtatggcatgagggcattcatgtctgcctgggtcatgctcctggggtaatgtcaaacatcaaggtcagccttgacagggacaaaaaaaagtcacagaaggggccctttggcctttgttgggtggggaggcttgtgatctggttgtaggccgagcctcttccctctagcccattcgctaggcgcagaggtcagctgcgatcctgaattggccctccaagccctgggacactgccccacgccccagggtgggcatcttgatggagcccctactgatatggggcacggggtatgttcccagttgtgtgccctcaatgaagtatcactgccgccttttgccccagccctgcacaggcgtgtcatgtgagttcatggctgtgcatgtgtgttctccctgcagcctctgccggggagctggaagcagcccttcggattccagggacaggccagatttatgatactgggagaaatatttaggcctgagacagtttggttgtgttaattatggaaatctaaagataatctatatttaatgctgaattttgtcaaatttgctaaagaattaggggagcgtgtgcaaacagtgacacttcaatgaagaacaaggtgcaattaaactctgaaatttacagtggaataattggaaagcatgacaaatatagttatcagcagcaactaattaggggtgtgctcgaggtttctgggcttgattaatctcgcctggatgctaataagttatgtagggcagatgataactggtttgtctcctccttccttctaccctctctccaaagcacttgaggggtaagaatgtgacccattcagttcatccctctgtgcagcccagcctgaaggggagggtgggggcactccagctcctatgctgggacccctgcccaggtagggatgatgtgaacaccttgcgctgcccctgctcaggcatcctgggggctccctggttggtaagttcttcttggtgtctcacttgaggcttgttgggattgggggagagtggcttggagcctgtgttggggtctcgctgagcctcagtgggccagattcattcccttgctgttgatgtagctgtctgactcccacctctgcttccacttcatgcccggtgggaaggggcactggaagcccccgctcggacctgcaatagatcccatgcaccgtcttccttggctgggcacttccgtccctctcccctcccaggattctgctaatcttcctcactgctgattgtggccaagccttggattcattgattaaagtttaggctggagctgatgctattaccctgctggagtgtggccagcaccctgggcaccaccgccaagtccagctgtgaaacaagcaccgccacctccctttctctgtctctcaccctgtctctgattctgtgtccagtctctcccctgtcctggagcctccctcagacctgctgcccttgtcacccttcaggggcctacctggtatgaccagctgacgggggagaggtgatcaccttcccaagaactctaccttctgccatccaccccttcctcagaagtcctcctgactgtcagctgccccacctggggtcccccaaggcagctctgtgcatagaccccaccctgagcaccccttgccatctccagccacttgctcagtgtcattggccacaggatggagactctgattgacagtctcagatgaggctgatgaatccaaaatgggacgttagatgaacttcttctttgtgaatgtcatcagtacaaccgggtctctcaaagcatgagcatccatgagcacgcatgtcataggaggccggtgtctgctgtgactggtggaggggatgctggataggacaggggccttcagcgtctccttcagagatgaggggtgtggcttctttgaggcctgcttctcttcttgcttttgggatgaggagctttggggtcagacacacccagacttgtgtcccggccctgggggtcctgggctcttcttttcccaggtctcgttttccttcttgtagcatagggataattccttcacagtgaggagcgcaggaaacggctaggaactgagcaggctctgagtacatgggcaccctcccctccccactcctgctccttccagctccccacccctccacccttcaggtggacttgcacactgttttaatcaatgctaggatgctgacgtgaaggaagctggggtgggaaccagagcccagagcttcacctcaccccaaagctgcttgagtcagggaacccacctagcttgaagtctggtgtgtaaaggtaagaaaaaggctttgtaaagtctccagcgaggtcagaagtgctgctcttgttagtgagtaacaatgtgctggaggagtgagttccagtaggctcctcacctctgctctctctccacctgatatgcctaaaatgtaaatcctatcatggcctacccctgctcagaaaccttcaataactccctattgcctccacgataaagtacagagcataatggtcaacactgtccacagttggccccagtctggttgtttcttcttctttcttctccttctccttctccttcgccttcttcttcttcctcttcctcttctttttcttcttcctcttcgctcttcgtcttctttcttcctcttcctcttctcctcctcctcctccttctccttttcttcttcttctcctcctcctccttttttttttttttttttttgagaaagagtcttactctgtccaggctagagtgcagtgacaagatctcggctcactgcaaactccgcctcctgggttcaaatgattctcctgcctcagcctcccgagtagctgggattacaagtgcccacgaccacgcctggctaatttttgtatttttagtagagttggggtttcgccatgtgggtcaggctggtcttgaactcctgacctcaaatgatctgcctgccttggcctcccaaagtgctgggattacaggtgtgagccactgcacccggccccttttgggcttcttgaagtccctttgctgtacccacccaaatgatgccctgttccccaaactcccacaacacctgacaatctgtaggcttttattggatcaatttccattttctgacatgctttccctcccactccctccccacagccactttctgggaggcccagctcaaatctcatcaccccctaaagcctcccctgatgctcctagttcctccagccatgcccccccgccgaccccccaacctgaattccctctggttgcacagctgttccttgcgtctgtgtcaggtgcgtccaccagagggcgacagacactgcgggcacaagcaaaatggccccaggattggctgcgtttcccctccccgcccccggacccatcctgcctctgctatgctgtcccctggacttccagcctggcatcctcaccgctggacttcagggctggaggacttggggacagtgcatgttgtgtcccttttctgcagagctgccatccctgaagatttgggtgaaatgacagagccagctgctcttgtttgtgtagtgcgtgagtttcccagtcactgttgacgttctgggtccccagggcagggttgagtggctttttttgtttgttttgagatggagtctacctctgttgccaggctggagtgcagtggcgtgatctcggctcactgcaaactccacctcccgtgttcaggtgattctcttgcctcagcctcctgactagctgtgattacaggcgcccactaccacacctggctaatttttgtattttcagtagagatgggtttcaccatgttgacaggctgatctcgaactcctgacctcaagtgatccgcctgcctcagcctcccaaagtgctgggattagaggtgtgagctactgcacccaactgagttggctcattttacagatggggaagcacaccttgatcatggctctgtctttcagagactggaaagtcacaggtgcagaatgctctggacagactaaggcttagagcaaatttgctgagggtgacgtggcctgtaaggggaagggttgacactcgaacccaggcctttctgactgccgggtgagtgtgtttttctccacatcagtttttctgattattcaagatgtaggtttaattctgtcattgtcacagccctgactctgaggcaaatgtaaatggtgccccaggcctcagaccccagcccccaaatccccacatgctgcgcatctgcggacagtctgagccacagctttctgtgaaatggtcaggtgatgcgtagcctcttcctcacagggttattgtaggacagaatgagatgatgcccgcagagacccctgtgctccaggatggaccccctgcgaacctgggctgggacatttccccaggggctcttagtctgtctcttgggggctgggacggggaatgcaaacacctgcaggtctccttcagccccttttgggggaaagaaaagagacctggggtctccttcctcaggattctccagcccttgcagctgctggaagtgagcgggctccgtcaccatggcaacgtggcccagccgcctgcagggccagtcctgtgccagccgccgttgacctcacttaggatgattacctttcggcaaataaaataattgtgttaataaagaggctgttcgcctctcattccccatcccgctttgcctgtttcccatccctatccggtggaaagaggattctctccacctggttacccctggcctgtgggatgccttactcttaaattgttgacgagaccctgactgggttataatcttggccaatattaatcgtgtcccaccattcccttcttgccttctgcctccttgccctggtgtctcttttgaagttgtacaattgagattatactactcatcctgtcttctttggacactgttttttttttttttttttttttttgagaccagcttggtcactgaagctggagtgcagtggtgcaatcttggctcacacaacctgcgcctcctggattcaagcaattctcctgcctcagcctcccgagtagctgggattacaggcacacgccaccacgcccagctgatttttttgtatttttagtagagatagggtatcgccatgttggccaggctggtcttgaaatcctgacctcaagtgatctgcccacctcagcctctcaaagtgttgggattacaggtgtgagccactgcgcccagcctggacatatttttgaacatcaacagggcctccctagctgttatagtaataagttctattttttgagggcctactgtgttttatactctttatgaatgcctttgcaaatgccctctctctaatccctttaacaattgtgcaagtcaggagcttcaataccattttactgagagagaaaatgtgtatgtatatattttgagtctgggtccccctatgttgctcaggctggtctcaaactcctggcctcaagcaatcctctggccttggcctctcaaagtgctaggattataggcacgagccactgcacctggccaaaatgtatgttttggcagggctagaaacatgtgttggttcagctcctggattgcagaacaggcttctctaactgtgcctgggaacattcagttcagctgcaggcagatacacacttgccatgggctcaaaactgggctgggcttccggaggggaagaagagagaaacagagaccctaggaagctccgagtcatggatcaggtgggtgggagtagatggatataaccatggaaaatggacatgcaggatgcagtgtgagatgcaaggtgcagtgtggccagtgctccgagaccaagagaatgatggagaccctgtgccaggtgctgcagaagcggacccccagagagacactgactcagcgatggaggccctgagagagatgaggaggatgagactggcagttactgagcctctgataagcagctgacactttgctgagtgcttcaaacttgttatttcacacaatgctcatcacaaccccattttacagatggggaaagtaaggcttagaaatttcaagtgaatttctcaaggttacacagctcatgtagagccaggattcaaacccagatcagcctgacctccctgcctggacttagtggtcttttgactccatcaggctgatcaaggatggagagagagagagaggagagtgagtgagagagagaaagagagagagagagacccatgaaacagattgagcaaggcatggagtgcaggcttcatgcacacggtggggcctcttctgggtctgacaatgccttagcccctgttctttgaggctcttgtttaagatttgccaaaaagaggtcacccaaattatggccgatttagaaagtttacttttcaccagtgcacacaaaatagtgcaaagagattaggctcttcgaaaggtcattttaagcctttcaaatagtgacagggccctgcaggcagtgtcatcctacattctcacactgcaaggggactgccctcgctggattctagggtctctcccatgactggaggaaaagtgtcatctggacactatgtcagaagtctagatttggcgccctctgtgagtctgagggcgtctccccttctgcacccggccacccccatgagaggtcctgccaagtgggtgagctgcggcggcaggcaggggtgcagtgcccatcattcacactagatggcgctctgacattggacaatcctctgagcatgtggctgcctagtggccagagggcagggctggatggctttgaggggaggctggtctcactggacctgacaccccgacctagggtaggccaaggggcgccggagatgtcagaagccaggctggggaccaggaactctgctcctccacccgtgactcctggtcattcttgggtcggggctgaaagcggggcagtgggaggagcagagggaccagagggcagctggaggggagggatggggtgggggggggcacatcagcaggccctggtggggcagcccggcacccctcagccagttaagggcctggggaaggttgtcctctcattgaccactaaagcctagggctgtagacctggggtctcccaggagtggtttggccatctgccttgcccttggacaagggggctgggtaagaggcatgggggcttgtttacaatgcctgcagctggtaggaaaggaagccttggcagatgtgactgaaggatcagctttgcttggagagcaagacccaggcacaggacctaaaggcctcaggtttgtgtccctgtttaggcatgtgaccttgggcaagccactaagacctctgcttcctaatcgtttctgctttcagagttgggaaccttgaatgagatcatgcacacaaaggcactcagcacaccaaatgcagggcatccctcctgtcctgccagtttgcggaagtggcatcttgcattatttccctgcctgcaggcccagtaaacactcagtgctgttgagtgattggtgcctgggggtggaggcagctggaattggcagtgttccaaaaggggcctccaaaccttgtacttgggggagtatccttgagagaccccgtcctcagatgtccacattttccctgtttggaaatgcatgccttggagctgggcctgactgctccgcttgcccgctctttgtctcgtccgttgtctggggctctgcgggatctagagagaaagaaaggaaatccccagcacttgcttgtgggacaagaaagcagaggggtgggcttttcaggggacctcttctccagcagtctgcttgcctacttccctcacatctggtgccaggggcggaaactgaggcaagggagaaccttaaggacaaactacaaatccctgaatgctaatagggataggagagtgaggtggtgaattgacttcccggtcccattgcagggactgagggggtctgtaaccctcgactcctgggggagaggtctcgaatggttcgctagagacattcgaggagttaggagatgggcagggaaaggtctgggaggaggaagttgagggtaagggcattgggggcagatttatttggttaacaaatgttccacaaacgctcagtgagaacctcatgtgggctaggcactggtctaggtgctgggactcgggggcccaggtgaataagcttcccgtcctgggcgagtttcctggagtaaaaatcaggctggctggggcttaactctatgtggctgccccatatcatctaacacctctaagtcccagtttcatcatctgtaagatgggaataataacaatgtctcccccacgggatgaccatgaatgttagatgcatggaaggtgcttagcacccagctcctgcatttaacaaacgtgaacggaggtggagtttgtcagtattattgtgatcaaagctctggagactgtgaccttgagcagattgctcaccctctttgaaccttgggttccttatctgagaaatgggttcatgacatctgccctgcctgttaccacgggaccctgttgttaaaccaactgagataatgcatgggagcacaggggatctgtaaactacatcacacacagaggggaatggtccatttaaatgatttggggtacacatgtgtgcatgtatttgtgcacatgtgtgcatgtgtgcaccactatcagagaccccagcatttgtgctccatctttcctgcgggtttgtgtccctgtttaggcatgtgaccttgggcaagtcactaagacctctgcttccttttgtgaaaggggctaatcatgtctgctttcagagttgggaaccttgaatgagatcacacacacaaaggcactcagcacaccaaacgcggggcatccctcctgtcctgccagtttgcaggccgtctgagctcaggtaagctgtcagatggatggatatatggtatcctggcagttcatgttaggagtctgtccctggagccctggggctggaactgaggtgctggcagaggtgtggagatgagggccaggctgagagttgcagcatttctccaaagaccttagggaagtgaagaaataaatctttctcagagatggagatgggatcaacccttccccctacctcaactctgggctgggcaaggttgtctgcagaggttgggggtccttgctcccctcttccaacatcctcttctccatgcacctctccacaactgacccctttcctgttagtcttaattcctgctgccaagctacagaacaacccagggaaaaataaccacacctgggtaatttttgtgtttttagtagagacggagttttgctatgttggccaggctggtctcgaactcttgacctcaggtgatccgcccgccttggcctctcaaagtgctgggattacagctccacacctggcctgttctagaggtttttgatgtgcccctcctggctcctggtacctgcttacctgcatgaatacttgttagtgcccagggctccccagccccatctccccaaccagctgactgaggggtggagccaggcagggtgcagcttgggcctgaggatgaagaagcaaagagccaggagagccagctcccggccatatacccatttctaacctctcttccccaggaaaggggcagtaggaagcagtgtggtggagtggaaagagagtgggtgttggacttggccaggctgggttcaaatcctcactagctgggggtgtctggggcaagatgggatggtaagaggacctagcctgtggggtgggcatgcaaccttcatgggataatctgtgtcaggtgcctccaactgtgagtccaagcctgtccaagtctcagttaacgaggatttgggcaattttgtgctcccccccactgccatctccccaccccaattctttctcagctcattgattgattgattgggtgaaaggatcatggagaggatgccatccagttggagatatggtgtgagctgaaaatcccagagtaaatgtcctttccaggacagcagagacgaaaagagcttttctggctgggagattccaagaaggctttgtgaagaaggagcagcattaacccgagtttctcagtgggctcagacttacaggtggagaagggaaggggatgcggtgggaggaatggcatgggcaaaggccttcagtgagaaagctgggcacacagccgtaaaatggctgtgaataggctgctttcctagagcaaagggtaagtgcggtaaaacggaaagggcgttgttcccaattcctggattattaaaacaaaagcgggatatattgggaaaagagtaggaggctgaattatttggataattacaaaactgttcccttgaatccccgatttgctttgctccctgtgggtggcttgcctcctttctccttcaccgcggggatcacaggcttcagaaaccctgaggggaatgtccccagagaagagcccctcccgtctccccttctccctcaggtcgtcactttgcctccttaaccccactcccactcctcaaaggaagaaggtggtgttggaggaagactggagggggagccccctatctgaggtccccagactgtcttcagagaaagggaggagcagcctcagcttggcgtctggggccctgtttcatccttgggtccgtgagggaagaggattctgctccctgccagaaacattcctgtagagtatttgcattacatccggctcacaccctcttccttcgaagaacagataccaggagatggtgtttgggcagggggatggaggaaggagggagagaggagagggaggaggggacgaagaggaagaggaagaagacgacaaagaggagaagaggaggaggaagaggaagaagagaaggggaggaggaagaggaggaaagagcaggaaaaggaggaggaggaggaaggggagaaggaggaggggaggagagggaggaggcgtaggcagccagctgtcagagctgcttattttatttttcttgctcctggagcaggctggcagagcagtccccgatagcagcaggaatgaagaacatgggccgaaggaggagataatttaggcctgtttccctggctgattccgctgtgcctccttctatctctctgcctctgattctctcctcctctgtctctctcatggtctctgaaggagatgaattccaggtgactctccgggctccactgtgcttcctgggagctgcgcgctgggggtgatgtttgtcccttctcactgtagactgagcttgggatttctcagcccccagttacttagatgtggctttggtcctctttggggccctagggtgggtggggagcccacattttctctctcccccattcttctagagcccagccagcctccatgggccaccaactacatcctccatggagaatcttcaaagctctagagcccctattcccaaaccatttcctgtcttttttattacatggacttactccaaaaaggagcgaaagaacttgtacatgtttccattctgatcagttctttctggattttccgggcatttttgttaccaggtgtctgaaagatcctgagtgctatgaactggctttcacatctgcgacctgctgtagccctcccacaacactgggcccaggggtgttgattttcttttacaaatggggcaactaaggcatgttaacagctgagcctaggtttgaacctggttccccctgtgctggtgcagagctgtttcccctgggatatatgtctccagtgtcactgcccttccactgggtttcctgcttttacctaacatcgactcacacggtcattttcggggtggcagggcctcctgtcttgtcgttttaatggccacatggcattccatcatgttgatggatcattttgtttggtcactccctcatcgttggatatgtgtgaggtgtctaatttcttgctataataaatgcaactgctgtattttgttcaaattactgttgttatcttcatcccctgtatgttccacgagtacgttcaggaatggaaaccaggactctttgtctcaacagggtctggggtggtggtcagtacctagcgtactgacccagaacatgatcaaagcagggatgggtggcagccacctcttggggctgccttggattcacctccagccagaagaagctacaatgccccctttaggggctggcacattgatgcactgtaaattctccatgtgcacatgtggcaaagtctggacccacttcattgatacataacatggtttatttcaatgttactcagagccaccaccaccacaaaatctggggggtgaaaggacccgtagtataaatctgcaccaaacattagccagggaatttaatattagtcaaatggccaatgttatcattaactggcttaacacagaaactgctaatggatttctcaaaacaagtaacaaggcttagagaatagactaaatgttataaccataaagttcagtctttagccatagcatctctatttggtggaaagcgtacattttatgaacaaagtgagtaatttgggaaaaaggatcaaagacaggaggagacccttgtttcagttccagtgtaaagggaggttggtggcgcaggtggcgagtggagttaggaattcagatggccttccggggatgtggggctctaagagctggcagaggagggaagcagagggccctggtcactgaagggatgaggaagcagcagatcctcctgatccagggggaggtgaaggcacagagcaggaagggactcgcctggggtcaggattggattcctgtggagttccaagcatctgagccaagctgcctcctggtttcgcaaagcatggatattaataagggtgattagtaatcatgacgtgtgaataataaggggatggttaattgtcctggttatgatgaacagcagtcactgggagagggtgggggagctgggacccccaacacacacttacacacacttgctcctatatgaatcgttcctggctgctgcttacaaggcagcagaaccagcaagctagaagggggtctgtatttttttaatataaaacctaataaggccgaatttaaaaattcatttataatttcctggctgggtgcagtggctcacacctgtaattccggtgctttgggcagctgaggtgggaggattgctcgagctcaggaggtagaggttgcagtgagctatgataacgccactgcactccagcctaggcgacagagccagaccccatctctaaaaaaaagataataataataatttccttttataccgttgtgaaaggacacattcacagcagaaactctggaaaatatacaaatatataaggaagaaaacagaaaccactgtaaacattttgtaaacactgtaaacattttgtaaacactgtaaacaatgtatattgtaaacaaatatacattggaggtgtatatgctccagacttttcttccatgcatacataaatataggcataaacagtatttatttatttattttacacagggtctcattctgttacccaggctggagtgcagtggcaagatcacggctccttgcagccccaacctcccaggctcaatcaatcctcccacctcagcctcctgagtatctgggaccacagacacacaccaccacacccggctgattctttgatttttttgtagagatggttcttcctatgttgcccaggctggtctcaaactcctaggctcaagaactcctcccgtcccggcctccccaggtgctgggattacaggcgtgagctgctgtgtccggcctatgaactgtatttgaaacaaaacataattaggatagtattctgcatggcatttggtaacttgcatttttttttctaacttacagatacttcatgtgctcttctccatggcactaaatggtctttgagaatatggctttttaatgaggggaacattatttggggcaatggggactctgttaggaaagaagtccatcctttcttgcctcccccagttaggaacgctgcaaggtcttcgggaaggtgatgctggggtggggcgggttacctggtgggtccttgtggtcaggaagtggggcagagaagggggcaggactgcttcagaacctgagcttgatggaggaaaatgtctactgaaaacagtttttcctcatactcagctgagggtggacagcagccagaatccttcactgggcatggttagagcctgataccggtgttagtacatggtcctagaaacatctttgaagccttctgagcctcagtttccccatctgtatgcagaggaagcagcaactatctcttgctcacctcctggtggactgtcatcaaggactgagatacgagcccacgtatgaagtcaaaaaatactgaagatggagctcccatcaggtagaaagaaatgggacagacctcagggttacagaagagaggccaagagacctagccttcccactggccacctgtgagacccaagggaagccctgtcctcttgcccgagacttgcatgtaaactgcagggctgcactcggcaatctctaagtatcctgagagctcccagatctgcacttctctgataggccaagctgggtctggctacagacgttcaggacacctggctagtgctggggtgaaggagggtcagtgctgctgctgcctcagggccctgttcttggggaaggggtcacagctggagccacagaccctctatgtcatggttgagccactctggagagaacatcttctggttttgggggtggagatgggggagtgtgtgtgatttcatctttcctaaaaatgggaaagaaatcacatgacaggaaaggatggtctaacttcaagggcttgcccaccaataccaggaagactctgactgcctcctactaagcccaccttcccctatctcagcattgctaagcacccctctgcattcatggactgatggcagatggggcaccgtagaatcactggtacctacatagctgtcactttgtcggcattcttatgccatttttttcttccaccccacccctcttatgcaatttttatccattcgtttattaatccactcgatacatgagaagtatccactgtctatttctcgatacatgagaagtatccactgtctatttctcgatacatgagaagtatccactgcctatttgacctactggctctgtgaccatgggcaaagtgcttcagtttcctgtcttcaatgtcctcgtctgtaaaatgggtctattgtaatgcaacaagttaatgaatattgttaatgtaacaagtaaaatgaaatagtaggctggacatggtggctcacgcctataatcccagcactttgggagaccgaggcgggtggatcaccaggtcaggagtttgcgaccagcctggctaagatggtgaaaccccgtctctactaaaaatacaaaaattggtgggctgtggtggtgagcacctataatcccagctaatcgggaggctgaggcaggagaatcgcttgaacctgggaggcagaggttacagtgagccgagttcgtgctgctgcactctagcctgggcgacagagcaagactctgtctcaaaaaaaaaaaaagaaagaaagaaagaaagaaatagtaagtgtagggtgctttgaacaatgctggaaacatagtaagtgcttggtatctatttgctctcatcatcaccaccatcatcatcattactgctactcctgctgttgtgtgccaggcactgtgggtaaagtgaaggccgagacacagtccctgctttcagggagtgcataatcagctgctttctctgggagctccaaagaagggagtgcagtagaattttgacaggcagcccctccactccatgccggctcccagctgtggctcccccaagacgtgacccctgccaccaagacccaggccagtgtgtggcttcacccagtccttaaaaagaaccagcccctccccccagctccctctccattgcagcagcacgaaggctgcttggagaggtgacaaaaaattaaaattaaagctaaattaaaaagaagattcccatttcctctccccatcgcactttccaccttaattttatcgcatcttccttctcattttattgacttttagaagcattgccacaagatttagtgtggagcaggaggggaggtaataaatgtggtgctcctcttgcctccaattaattcttccagggggcgggggtaggtagagaagaggtggctgcccctggatgtgaagccccaggaagagggatgctttaagacctcagaggtgggggagatacctcatggtggaagtgatgctagctttggtttttgtcccttccctggactcgtttcctgatggccgagagaaagagaatcagtcccaaccatgctaatcaggccagaaaacagaaatcagaattcacactctccctgatctagctttaaaaataactccagaaatccctcctcccaaactccacccatatttcttgggatgaagattccccacccgccaaacagatctttacttaattttattttatttcatgcactcttggtacaaggcattttttctttcccccatcctcccttctttcttcctctatttttttttgcttctcccaccgccgcccccatctctaatatcattttcacccgcccacagagaccctatgtgtttgtaattttcttctgaccctaatggctctggtttcccctcagtatttaagcggaacaagacagaggtaagtggcaaataaacagcagttcctatttatgctgccaatttcggttgatgttggaaagtctgcctttaaattaactctgctgctgtctgatgcagaggaatgtctgccaggcacggagagcagccggctccctgctgcccagtgcagcccctcaccctattacctgcccgggttagctggaggattgggtggtgggtgggtgtggagagctggtgcccaaagtggtttattttttttaaacaggccactcccctcttcttggctttggcctttcacctccataggccagtggttctccaagtgtggttccctggccagcagcatcagggacatgttaaacatgcaaattctctagccaccccagacctactgaatcagaaactctgggggtggaatccacccattgtgttttttaaaaacaactttatagaggtataatttacatatcataaaattcacccgttttaagcatactagtcaatggtttttagtaaaggtattgaattgtgcaactgttgccacaacccggttctagaacatttctgtcatcccaataagatcccaggggtcagtttacagtcagtcccctccccgtcccctagccctaggcaaccaccaatctactttctgtctctatagatttgccttttctggatgatcttttgggtctggcttctttcacttagaataaagttttgttaacagctttattgagatgtaattcatataccatacgattcacccatgtaacatgcacaattcaacggcttttatattcacagagttgtgtggccatcatcacaaccaattttagaacactgtcaaaagaaaccctgtacctcttagctgttctttccaaactcccctagccccctcagtcgtaggcaatcacaaatctactttctttttctacagattctgggcatttcatataaatgagaaatcatataacatgcagtctttggtgactggctcctttcacttagcaaaatttcaaggttcatccatgttgtaacaatacatcatcagttcagtcctttttgctgctgaatagtattccactgtatggatgtgccacattttgcttatctattcaccccaaagttgtggactttggggttgctcccactttttggctatcatgaataatgctgctctgaaaattctgtgcaagtcttagcaggaacataagaaatctgtatttttctttcttttcttttcttttttttttttttgagacagtcttgctttgtcgcccagactggactgcagtggcacgatcttggctcactgcaacctccatctcctgggttcaagcagttctacctcaggctcctgagtagctgggattacaggggcccgacaccatgcccggctaattttgcatttttagtagagacagggtttcaccagggttgaccaggctggtcttgaacttctgacctcaggtctggtgcttcccggcgtcattcccatcttcctgaagagccaccctggcctcgccacctcagtcagtcaaatcacttgtgcaaaggctccttcccctgggctctggactccgtaggaatccatcccattaacagctccccagataaacccagtttgagacagttccttaagctctgggtactcagttttccagactggtgaaggctgtgagaatgctgaccctcagggatgcgcggggggcggagggcgagggggcttccctggctggtgctctcattccaggcaggcagaggttagggaagcgtatcttccctaacctctgtctgccccattttccactaaagttattttgggctcccagtaggtcgctgggtggactttacctcccacttcgacatcctgccctgtcacctggctcttctccttggctcggcctgccttcccctctggaacccgccgcctccacagcgcgcctccaacaccgctgtctctgccccgcgccccagagcgctcccagctttctttcctacccttcccatgagtggagccgggcctggggcgccttaggcggtgacgatctgcagaagtctttgagaatgcaagatcttttggagccttcggtccgccagggccgggtccagtcaggacgccccgctcagaccccttcccagcctggggtgggcccaggcccgtctgcccccactgccttgtgttccaggagcccccgctcggagcccagacccggtgcccgaagatgagagtgccgcttctctccgtcgggtgagaagccagcccacgtcccgccggccaggcacggtgtctctcggggcgccccacgggaacccctgtgcctccatcggcgccctcggcggcggggcagtcttggcgctctcccctcgcccctggcccaggcccggctcgcgggtgtagctcttcctagggccccctcccctttccgggccgcgcgtccgccccgcatcgcggcggctcctcggcagtgtttgtttttattggacgcacagtgaccgtgacgggcacggggcgcgagctctcatcaccacaatgggtgtgcatggcgcggggcggggggcgctgccggcctcgagcgagggaggggagaggagggggtgcgcccgtgccctgcccgccccgagttcccgagtccgcgccccaccaccgcagcgagccgcccttctgggccgctcctctgttttcctttcccatccgttccctttgcctcggctgctcggagacatgtctggtggcgatcggggacccagagcccggcagccgctcctgtccctgtccctgcgatccctgtcccttccctttgtctccccgcgcagcgctctccgccgcggaaacttcgcgtgacacaaactcctggggtgacagcggaaaggggagcgtgtaccttgtgaattaagagatttagtcacttgtggaatgactttattttatagcgacttcctccccgactgagtgatgttgcatgcattggttgtatttataacttaatagcttttctcaattttattatactttttatgatacttgtggctttatgggacttcataatttttctcagattcattaaattcagctgagggtggagctcatgacgggagcagatacccgactccaggatggcagggggagcaggcggggtgccactctctccaccctctgcccctcctcagttactgggcgttttaatgactgctggtggctgtggtagtggtggcggcggtggtggaggcggaggcacggtgtctctcgggtgatcttggcttagttttctcatctgggatgtgggatttgcagggaaacctgcctcagagattcctggctgtttctcaggcagcggcccacttttggtgacagactgtgtctgatctaggcttgtccccagttccctcgctgcccttcctctctggttctttccaacactaactcctagaatcagaaacgcttccagatgtcccagtccagcctcctcactccacagatgggaagacctaggctcagagaggtgccactccagaatcaggggcaggcagaccgcttcactccactgctctctgctgtctccaggcaatggccgcagactctagctttgccctcagcttccttcctgcctccaaatttaatgtcctgttatggtctcagagggaagagtatcatcatcataatagttaatattgatagaacacacacaattatgttctttaatcttcacaacagccctgccagagtagctactagtgtttaccattctacagatgaggcagcagaggcacaaacagatgaaaccatttgcagaataagtggcagtgctggggtggagagactcaaggctactgtactctgtggtgacctcatctgtggtactctgcgaccacagtcacagctaagcggattatttgcacattttcctgatgacttctctctctcagaattctttttttgttggaaggaggtgggtgggaagagcaaatagtccagaggataaattaacagagcaggggctcttaattccagagctgtgatcttggttgacagagtgggagaaggcagaaggggatgtgggtcagctgtgggtggagaggatggtgggggcactggcacgagtgtctctgctgccctcaggctttctggcatccaggatggtagtgattactgatagatggcaactttaatcaagtgccaacccctgccctgctcagagccttccaggggcttgtagacctcttttatttctgagactctaatacatttaaaaatgaagagataccaggcagggttgcaaaagtgtcatctgatttgcattccacaagttaacacttttaactcaacaatagacgatgcatatagttgtaccactcacaggatcatttcaaggcttaaaagatggtgaatgtaaggtaagttccagggcagcaggtgtactcatcccctgtcttggtccctgctgtagctcccgcatctagagcagtgcttggcacgcaggaggtgccccatcatcttggctgctgctctgatgagtgaatgatgcactctagcatgggctgagagactccagcttaaacctatgggagaaacaccttctttcaaccctgttggggtatccctgtggctgtcaacagaccccatttggagattatggtaaaaggataaattggggcctttggtggctttgaggccggagtgctgtggccagcctgccccctcccccctagcccttgtcccacacaggccttgttgctccccttgccagcccttctcagggtttgcctctctaagggagtcttcctgggccaaccttgacaaatccataaccccctgatcctgttacttaaaggatcagtctcaatcagaggttcctggacccttgcactgcagaccctcatgcgggagggggccctggaattcttgcatggaggtctttcgaccactaggtctgcctaactatacttggagaccaacagaagccctgtcgtgttgatgtctgtgtttttatttttattttttccaagactattgtgaagagtaaattaaaattctttaaaagtgttcctggatttattgtagctttgggtcatcaggcatttcctcaatcaacagatgttagaagtacaaccactagtgtgcaggtgactgcatgtggctggtggggtagtgagtaacttttggatgctaaaaaggatctttggaatctggagagttggacactcctgcttagaggatgctgtcttcgtgtgttcacaactgccaggttaactactcacatggtgtggtgatggtatgttgtatatgtgatcagaaagtatactcagtctctcagatgagactgcaggaaggcagtggtggaaagggtgtggagtcagggggcctaggttcgaacccttgctctacttgtgaactagagagacatcttgcgccaaaccatgacctcttttaagtcttagtttcctcacctataaaataggtgaagtaaaaccatctctgtcaaggggtgatgatgaccaggaaaaagcttgttaattagcgaatgccaaatcagttgtcacaatggtaagcatcagccatcaaattctttacgtacatgcagtgggctctctgcaagtcaactggcccagcccatcagaaaatgtaacagtccctgctggctcctaccttgcctggctccccagcctgaatgggagctgtgccccatgcttactctgctcggagcctccattatgggccttgagtgcaggaccctcaagatgcatttgtaatttttattgttatatcttttaattttatttcgctctctccgctgtcttgagcaggggagatagggagctggtatttattgctgttgctgcgacctacctcttggaacgtatgtatcagttaatttaatctcctctcgttttatttaaactgtttttcctgattcactctcttcacttctccatccagagcccctcctcctccatttccccccacctttgccccctcccctctggtcctaccctcctttctgtgtctgctttgggctccgtccctttcctcctccttctcccccttcctccccatctttcctcttagtcctcctcctccctccctcctcccactctctcctccctcctccctggcctctggcctgggcctttccattcctgggttaagggaggataaaggggcctcttgcactgaggttgctacagtattttcctggcttccactcccccctcttctctctctccctctctctctctgccccgttgcctgattgacatttacaaattacccagctgaaagtgttcaatccctgacccgcctgtttctgttcagcaatgagtgagatttgcaagcattttgtcatataattactgcaaatcccttgaaaatttccacaacaaggctaggtgaatggtaatttgggggcctccagcccccaatcacctcgacaaaagaaatctgaggccagaaatgcaaaccagcccccgatccttggtatttatttatttatttatttggagggtcaggaggggctcattggtcgttttgtttatttcccctagagatttctgaggaaaacttgaatggtgcagacacatacttctccacttcctccttgtacgcatgctgtaaaatatttggattgggagatttatttgccttacacgagtgtatttgtgctgattttattgtattgactgggtgcattttttctgcgttctactacagttttattgtgtgccagtcgtgggcatacatcacccacattgttttccgcaaaaattatgccccatttcactgtgtcttgataggacttactgcattagtacctgagtgcggagatttgctgctgctgtagctaccctgccacctggggccgctccatctgggcagcaccaggcacactgggccacagacacggatacctgggtttccgtggccacccctgtgtcccctaatgtctggtagtcttggcccatagacctggggagggggatggacatggtggaggggactgcagttggccatagggtcagtggtcctggggaagagggtggaagagggcacagctgagcagtgggttgaggaggacatggggatctgttaatgtgtctgcttcctgccagcatgtgaggacgtctctacccacagggattcattcctgagaagcaggcatgggcctttcacagtctctcttagggacttataactatgatggaaaccatgaatttcacacttaccatgggcagggggtgtggtggatagcacggttgttctccccattttacagatggggaaatggcagcatggagagacttggccacttgccctgggtcacatctttagggaggggcaggtggggattgaagtccatgctcccccgaccccagaacctgcttttttcaccccctcaggaagaataggagaaaggaggcaggtagcgaggatggtgatttaaggcagaagagtttaaagctggaaagggtcttagaaaccatctcactcacctccctgaaagatggggaaactgaagccccggggaggtcagcaatttgcccaaagccaagcagactatgggtggtcaactgagcgagccttattttccttcttctcctggggccatttacagggttggggtctggcttttgggtatctgtctggcttatgtggctactccctggtgtaagtttctgtgaatgtgtgtgtgatgttgtgtgtgtaagagtgtgtgtacgtgtgcatgtcaggcagagtgtagcactgtgagggtgccatggctgatttggtggatgagatggattgcctgatgcaggcctgggtccccgctgcccctgaaggtggcagtgaacttggcctgtggtcacccctccaggttctcttgtctggtggttcctgaagtcgcctttcctgtgaccacgttttatggggggctggaagataggtttgggactgacctgttcccaggacttcccgagtgaccctcccatgtatagccatttgtcccgggtgatcagtgagtgcacgggaaatgcagtggattgatttaaacatctcagcccttccccctttccatatacttttttattttttaagtcaaagcttatataattaaattaaagaaaatgtgtctaataataaactgtatttcctcatggtaaagtcccatttttgaagcaaggttgtaatatcatatgtagaaatgttttcccttgggtattagctgtctcttccagttaattgtttctatcatcacatcaggagcttgtaaggaaggggtggggagggggctgcggtcctgcctcctgcctcagcagtgccacctccaggaggatcctccagaaggaagctgctcagcatcagaggctgggcttgtttgagggtgtggggtcagtcccaggcccacgtggctcagctgcctcgtgagggcagctctgaacacagacacccctgcaggtgtggccagggaggcctctgctccttaaccagccccacaggcagtagcatgtgcctgccctttggcacacacgtgcctatgtgtgtgacccacccccatgtgcacagatgtgcttgcacacacagacatcacaaacctgtaggtggacaaactaccacatgcagacactacctcacttgtgtgcacaaatgcatgcagacttgtgcacactgtaggcacactgctgcacatggggtgtcgcaagctgatttttttttttttttgagacagagtcttgctctgttgcccaggctggagtgtagtggcgtgatctcagctcaccacaacctccacctcccaggctcaagccatcctcccacctcagccccctgagtagcaggggcacgccaccgcactagctaatttttgtattttttgtagagatgggggttcaccatgttgcccaggctggtcttgaactcctgggctcaagaaatcttccctcagcctcccaaggtgctgggattacaggcgtgagctaccgagcccagccacaaactgattttatatttgtataaataccactctttccctccaattgaagtcagcctatggcttcagagtcaagagcccaggttccagctttctcccagtgttaatctgtgtgagctgaggcaactccacaccctctctaggctgtgggtctctctcgtggtagaagctctgatggcctcaagtctctctgagttctaccttcccttctcgcggttatggtcttctcactcagggtttcttagaaggaggcacgaaggggatctctccttcttcctgacctctagcccctgctttgtctcctggcactcaaggtccccacgcttcctctaaccactttcggtccagaggcctttcttcacaatgctaaggtcctgcagtgtccagaggccatcgcagttcaggccacaaatatgggaagcaggcagcggtgagccggtcatggctctgccctcttctcagcaagcctggaatttgggtttgcatggaaagctttaaggagtcttctgggtaacccctgcaaatcccagacaccctctccctgcagatctccataggcaatggcaaagatggctcatcccagccaaactggaaccataaaggtatgagatcagtaaaggcccaaggggctggctgaaggagaggagcaggaaggaggagatgagtggctgccgaggtggcagggccagtaggaatgctggcattctttttttttttagatggaatctcactctgttgcacaggctggagtgcagtaggaagatctcagctcactgcaacctccgcctccggggttcaagcaagtctcctgcctcagcctcccgagtagctgggattacaggtgcccaccaccaggcccagctaatttttgtatttttagtagagacagggtttcaccatgttgcccaggctggtttcggactcctgatctcaagagatccacccaccctggcctcccaaactgctgggattacaggcgtgagccactgcacccagccagaatgctggcattcttaaccccaagaccatctgtccccgaggacaaggctcctgactcagtttcccctgacaaagccagaaatggaagtagaaagttttgagacaggtgtttgtatttgtgtcctagatggattttcacaacatctcattcttcactccccctaaatgaacaccctcaatggtgggggttgggaagaagggggagaagggtggtaaccaggggcaaccctcctttctctccctcatcccgagttaatgccactgaagagctctccagggccagcgaatcacccacataattatccctggaggtaatgggcttggagaggtggtggggggcactgaggggcagaggggagctcaggccgagggatttgttgaggaagaggaacagagggatctcccccactgtgggaggtgggctgggacagaatgtgggcgctgggcaggtgtgggtctcagctgtcaaccccgcatcccagtctgcttttcccacagtgacattggaagtctgacctgggggctgggggaggggaaggaggggattatgtgtggcagtttttcctggcttggagtctgatttctctcaagaatccaacctgaaggccagtttgtcttctattgtctggtttgaaacttggttgtgtgcgtgtgtgtgtgtgtgtgtgtgtgtgtgtgtgtgtgtgtctcacgggttttctagtttggggagaggtaggtcaaaaccaggtacccgacttcaggttcttctccctcttctaacttcagttctttccttggaggagggcatgtggaggaggggtgtcatgtcagacacccccacttcctagacacaggagggaaactgctaccgcggcttacagctgccagctcaccccacaacacatttctacacagagtctggagagagagtgagtgtgtgtgtgagagacagacagatgcacacaggcagagacaggtagcgaggggttaagctggagggggctttgcagagagtggggagggggcgatctttgaggataaagctaacttccaggagcagaatcccagattacaaggcaagccagggagcggggtccaatggctggtctacgtcatcagtgtctagatgcttctctgcctcctcctgccaacccatcgcagctccagcacaaatttgcatttaaatagagattttttttttttaatgagaaggacccaagggagcccctagactattaagtttccttctgggggctgtgcagagccttcttcatttgcccctccactccagcctccacccttcctcccccaactgtcatattattctgcagccatatattctgagggccagatgaggccctggctctgacaatctgggggcacttgtggggacaatggggtcagtgctcctgggaagactgagaatgtgcagctctcgaccctctttgtctgctgcgcccaagcaccccaccttcaactcctttaggcctggactgtcggtcttgttgccggctccgggctgcaggcgatagcggcggaatccgtgttatctcatcacattgggcagtgtgttaagaggcaggagaccctatttgagtcttggctctgctttcccaaggctgtgtaaccttgggcaagtcgctcaacctccctgagccacaactgtcccatctgtggaatgggggtaatgatagaatcttccccataggtgggtgtgaggttgaatgagataatgtggcatggtgcttagcagagtgcctggcacactgtatgccctcgataaccaaattgagaagattggatagagcgagatttcaagaaaagcgtctgatgctgtagtggaaagagcaggatctgtagtcaagagcccgggtttattttcctgcagccttagttatgagccatgaggctttcccatctatggcctgaactttcctcctctgtcaattggagattctgagttaaaactcacctcaaagggtttttgtgagcatcaaatgatacagccagggctcagggtccctagcgcacaattggtgttcagaaaatgttagttcttctctccttcttctcccacagggtgggcggggcagaaaaatgtcccaggggcttggagaatgtttgggaggaatggggccagggaaggtgcccagggatttgcagctcaatgggagaaggtatgggttggtcctaggaccctaagcccggatgagtggggacatgacattgtgtgtgttggggaggtcacaggaaatgagggtgtcagcacacccatggctgatggctaaggagcctgggagggaaattgaaggagaaaaggtcagctcaggtggtccccctacctacctctcccccagctcctcatcactggttctaggagaaggaaatgagacgtgacaggtccctggccacctgggataggctgagaatggagacaggatgggcataggaggtgcgtgtgtgtgtgtgtgtgtgtgtgtgtgtgtgtgagagagagagagagagagagagaaggaggaaagtagggaggaaaggagagagacctgttattcctgattcgcctgtcccaccaccccctgccctgggacccagattagtcctggcatctcaactagcagagtgacagtgacaagttctttctatggtttaatttccctctccctcctctttcaaatctttctctcctttccctttctcttttttctctccctcttttttctcttcttccttctcttctgttttagtttctacttcctttcctctgtttcttttccctttttttttttgagacagggtcttgctctgttgcccaggctggagtgtggtggcacgatgtcggcttattgcagccttgatctcccgggctcaagtgattctcccacctcagcctcccgagtagctgggactacaggtgcataccaccatgcctggctaatttttaaattttttgtagagacagtgttttgctacattacccaggctgctcttgaatttctgcgatcctcccactttgacctcccaaagtactgagattacaggtatgagccactgcactgggccttatttatgattttattttattttattttattttattttatttttttattttattttattttattttattttatttattttattttattttattttctgagacagagtcttgctctgtcgcccaggctggagtgtagtggtgccatttcagctcactgcatcctccaccttctgggttcaagcaattctcctgcctcagcctcctgggtagctaggattacaggggttagcccagctaatttttgtatttttagtagagatggggtttcaccatgttggccagactggtctctaactcctgacctcgtgatccgcctgcctccaccttccaaagtgctgagattgcaggcatgagtcaccatgccctgccctctttttttatttttaaggaaataatgtcttacagacagacttcaagagcctcccccaaccggcccccagggcctagctagctcttaaggcacctgtgtgagaattaggcacctactggaaggaccttgccctgtgggtacagggtgtggctggttgatggtgctttctatgaacaattaaaggcatctttccttctgatggggaagcctcataccagggcacgagttagttggtggagcaaagggtggatttagcccttgctttcctccttgtgcagtgagcaacctgcacacccatatagggcagtcctccaccccttttccctcttcttcctcccactgaggggccattctatactgatgctgttgtgtatccctcacatctacatgtgtatatttcccccttttctcccttcccttttcaattccttttccttctttctcctcctgttcccagcactcactgtgacaagtcttacacaccagtctctttgcatgcctttgtatgtctttgtgtagcagccttagtatgtgtgtacattattattgctacatgggatgggtgttctcgtggcattctttcagggattgacacatcataggtgctcaagatggtgtgactgggttgtgtgtctatgtgtgtctctctgtgcgtcttggctctctggcactccccagccattccttccccagagcttagaagggagagggaattagaagggaatcccacagggctgagggcttatctcctccagtctcctctcagcctcttcctggtccatagctctttcaccatgatactcaatcttccatggagaccctgaagagggccctgccctgccccattggccttgaggtggggccccctctgcttccctccccaggcctcctaaggcctccaagccagagctggtaggagagcggcaggggaggggggagtgggaggaggagagggagcccaaggaagctgggcaggggctggcggcccctgggacccctttctacaaggacagaggcggcaccagctgctccacagaagaaatattccccaaagtcagagtggtcgtctcgtattttaagtggcccttatttatcaccatcctcctgggctccctatcgctgcaaatgatgataaaagacagcggtgaggggggcgcgggggctgctcccggctggccctgccgcaccaggggaggcgcaggcacacagcaacacacgggcacagcgacatgcacgatgacatacacacacagatgcagacacagacacacagtaccatccatgacaacagctacacacacacacacacagtgacatgcacacacagacttagctgcaacagtgacatgcccacaaatgctaaccacaaacatacatgctgggtgacacccaaagctgtgaacatacacatagcctgatacaggcgcagggacacattcacttgcacacacatataccaatatgcatgtacagtgatagacatacaccggcacacacatgtgacaaacgtgtcactcaccaaaacaagcatgcactcacacgctcaccccaggcactcacacctcagtgtacaatacccactcctcgagcccaccgtgctgatgtatccaccatcttcagtgtgactctacgtgtgtctgcctcagatgacctctgcatagaggccactgtctctatgtggcagccagctcataagtgtgtactctactccatctacacctagccaaacacatggatgtgcaaatgcattcatagtccaaccaaaaataatgaacaccaaacctcacctctcaccatacacagaaattaactcaagatgtaaaacaatacaacttctggaagaaaacatgggggaagacttttgggatcttgaggtaggcagagatttcttgggtagaacatagtcataggctggaattgcatatcattgagcacaagctctgaaatcagaaaacatctctttgattcctgtcttattgtataactggctgcattgaacttaggtaagttacttactttctctgagctcatatgccttcttgtacaatgaaggtataatactacctacctctctggatgcctgtaaagttcagagaactaatgcatgtgaaatagtcttttttaaaatttttattgtttttgagacagggtctcactctgtcacccaggctggagttcagtggtgcaatgtcattgcaacctccgcttcccaggctcaagcaattctcccacctcagcctcctgagtagctgggactacaggcatgtgccaccatgctcagctaatgttttagttttatttatttatttatttatttgcagagatgagatcttgttatattgctcaggctggtctcaaactcctgggctcatgtgatcctcctgccttggcctctcaaagtgctggtattacaggtgtgagtaatggcaactggcctgaaataccttttgaaagttgtgatgcactatatgaagcttggctaaatagaaaaaaagttttgtgtattgtaattattcacacacatacttaggcatacctcttaaataagcagtccataacgcacacacctgcctgcctgctcactcaggggagctgggattggggctgtcacattgaacttccccttatcaagggaagtctccctccaccctaatcccacacccatttccacatccagttgccaatcagcctccctccccagcctcagcccattagtacagctccctgggggaatctattttttaaaggttattagcagattattggttctttatcaacctcaggccccaatctccaatctcccaacgaagctattgtcgcctaataagatgcacttgataatcttggcatgaaggtggtggagggcctggtggggtgggggcagctggaaggagggaagggttaacagcaccaccccagcccccaccctctcggtcctcaaatagctgaactactgtatgttgtagttttcaactgcaaatcatctttaatagcagacatcacgggatggctcattacattaagctatttttcatgctatctcctgtaatatcctctaatccaatgcgtttcaaatcacctcgggctaaaataagagacatagcgatgtaatagcctagtgtattagtgggttaattgccctgttgtactccttctagtagctatctctggaatgacttctatattaattgtaaattgcttaatacatttaactccttgccaccgccctatcccctagcgaaggaggccactacccagttgcttgtgtgtgtgtgtgtgtgtgtgtgtgtgtgtgtgtgtgtgtgtgtgttttgtgggcactcctttccaactctggttcccctctgtctccttggtccaagctggaagagcaggtttggaatatacttctctgtctaatgaggggaagggaatgagacaggcatttattgaacacctactatatgccaggccctgggctaggccttttcaccaaatgctgtctcactggagcctcaaagaccctgagtagtggcagcattcaacccagaggtcatgcaacttgttcaaggtcacagagctatgatatgatgaagctgtggttacacccagacccgagagctcctaaaccacagtggctgagcgtggggcaggaccctggagctttggacattaagtcagatgccgtcagcagggtcctggggcagctcctggtctgcaggggagagacacagcccttgagagacacagcccttgacctgtgggagtccccagtctgttgggagagacacaagccttgcactaggggagttcccagtctgttgagggagctccaacctctaacctgggaagccctagtctgatgggaagtcagatcctctgccaagggaagctcagcaaatgggggacagagctcctgctttgggagcacccactctgacgggagggatatgtctttgctctagagagtctctggtctgatgaagaaaacgtcacttctgtcctggaggaaccctcagtcagatgagggagacaccgatccacacagggaaaacagaaataaggtgcaaatgaatgacaggcaggcagagcaagtgcacagggcagacagtgagctcagagcacgaggggagaatcagccctggcctgcgtgggcctcagggccagactgggggtccctccctgttcgttgcctctctctcccttcctagatgtgtggtctctgaacttcccccgggctgcccctttcccagtctgcggagggaaacaccctggccagggcagaggtagagaccttctcctcttggtgctgacagccccagccggctcccccttttccacagaagcctccagcggccttgggactctctttcctcctctctggacaggtgacaagtgggggtccctgggggagaggaaggagaaagaccaggaaggcagaaggagctgaaggatgagcatagggcctgatgaaagggtgccaaagtcacaagtcacaagggcagacgagtgtttaccttctacaaagtagcactttccacacacacaggtacacacacacacacttgcgcacacacatgcatgcacacacataggcgcacgcacacacaggcacacacacacactcgcgcacacacataggtgcgcacacagccgcacactgcgcacacgcacacacacacggacacacgcatgcacacacgcacacgcgcgcacacacacgatgcattctgcgtaccagtcatacgggagtcacaggattgaaatactcttgtcctgctttctcggggcacatagctgggcagagggacccaagttcaaagttgcctcacggagccttcttccctcaggggcggtcctaacgacctcagtctgcgacagaagcgggccttggaggctctcggtgagtctgggcccgggactgtggcctccttactccctgagttaagtccttgggccaaaaaaagagaaagaaggaagaagaaggaaagggaggggagggaagggacgcggggcggaggacgcagcgggcggcctgcggagccggcctggctcggggtgggggctcggccggagttcccgcggctgctcggcggcggccggctcgggagcaaccttgagcgcggccgcggagacagtgatttaggtgccggcaccggagcgtgaaggtaaatggccacatttcaccgtcgggaggtgagccggaggcgcccgccctggcccttcccccaaggccccgggccggtgcgggcgggagttttgcttcccctctctgacccgctccgaggcccgcctgggagggcggcgcccccacggtgcaggacaggagggctgcgccgggctgcggggtgagcaagacccctagagctgcctttcccgaccccttcctatttggggggctgtttccctcacttccccgtcgccccggcctcctcccaaagctgcttccagagggaagctgagaagcaagtgcttaaagcctctggcacttgggggcgccaccttctctcaggagagggtgggcggcggcacctccggggtgctagtccacgcgcagggagcttccccaggtcacctcctctactcctcaccagggtccattgaggcggggcctgccttatccccatggtgcagattaggagccgaggcccgggagctcgagggacctgcagaaggccacgcggctggaaggggtggaggaggctggggacccaggcccctgagcctcctgtgctctattgcctctaagaggtttggagtggggtgaggtggggggtgcttgtgggtgtgggaaaggttggcatctggccgacctcactactgttgtgtgtggaagtcctggttataaaaataatacaatggccaggcatggtggcttaggcctgtaattccagcacttagggaggctgaggcaggaggatcgcctgagcccaggaggtggaggctgcagtgagccatgatcatgctactgcattctagcctgggcaacagagtgaggccctgttctcaaaaaaataataatacatgctcttcacattaaaaaaaatccagaaatgtggatgtgatttgagaaccctttctcctttgggacaaagcttccttcctgaggccctgcccctcctgccaggtgctgagccccttgacccctcccgttctaggtaaagcagatgtgagtggaatgctgagatgaattgttcgattcatttcgctgtgttgctgaagagaggaaaaaagaaagagagccataccagggcacgcaaacattgcctgcgcagaggcatagcatggcacgatagcccccagcccatcattttccaggctccagcagggtggcagaacaaggcagggtggaggggctcagggcacaaggtcctggccatggaagtctccagccagtgccagtctacacggaggcctgcagcagatggaagggaaatcgttccctggctccactggggcatctttggtcattgttattcataatggctgctttttattggaaacctactacgtgggtggcgtacctctaatcatgccagcagccctatgaagtatgtatcgttgtccctattttatggataggaacactgaggtcagccccctggcctaagaccccattgctgagaggtggtgtagctgggattggaccctggttccactgaccctaaagagattcttcttcctgcagccactgtctctctattccactgtctgtgccctgggggagaaaaggggtctgccgaggcctgggggagcctgcttggagttggatggtgaaggagactggcctttaccgcatcgatgtggttttcctgggaccattctcctgaggagtgggggcgggaccctgcttagagaaggggatggtgggtgaggtaagtggaggtctaagttctcagctggtcttctaatttcaggggctctgtgggcccctcaccccatgttacccccaaacatgggcagagagaggagtcaaaggcagacggaagagggtcactttgtgggcagtgacctgaaggttcctggggtctgagggtcccagaggagggtgtctggggcgggagagaggtcatccttcatggcctgaagaccagaggaggctgtcaggggcgggagagaggtcatccttcatgacctgaagaaaccttggctgggccagagaaactaagtaggggttgcaggcagatgtagagtctcctttccccagaacagggcccctgcgtgggagccaaacaggccacagggcccaggtgcctagcaggctgagtggtgcagaaagcctgagttcctcacttctcatagctgacatttatggaatacctactatatgccccaactgtgctaagccttctcttaacgctgacagctatcttatccagtaggaacttttattaaccctgtttgacagatgaataaacagaggtgcaggctcccatcagctgagcctctcccaggcccgcttccacccacctgggtcaggagggcacagcgtttggggagggggctccaacccttttaatctcagcacagggccaggcacctggaagtcttcagcagatggaaactcttgtcattattcttggcctttagtgtgtagagcttcaggctggggccaacttgcctttcaacccattgtctccttgcttggctctgagagccagggatcccatctccttacctgggggcctcagggcacacctccctcccagcttcttcggaatctgcctttctgcctccatcttggcccttgatcttggaaagatgcctgtagcggcacatgtgtgtatgtgaacatgatcgaggtggagtgggtgacttcagagatgtctcattctgtgatgaaggcccggcagagagcagggaagggtgtcctaggaaacccctcccaggacaggctccgatcctaggtcagggatctctccagccttcacagagtggggagcttcaggttcctcactcccaccctttctgagctgggactgtcatatggatagaagtgggatgcgaacctctttcccttcatctgtcttcacagtggtgacaggactgggggaatatcctctttctgggtcctcagccgtctgctgccccctttcttagaatcattggttcacccagtgccacacttggcagggatctcagattccagctgttctgaccccatcttctgatagataaggaaagggaggcacagagaaggggagtgacttgcacaaggtcacagtcagttggtggccggcctgttgtctcctggtgatgctgggggaggcagccagatgatcatcgcatagagctcccacaagactgtccctcctctttcctggggtgttgtcagctgaagcactggccaccccctccccatccccacgcaccaggcagaattgtcttaatgcagcaaattgttcatacacatgtaagcaaatatcttctcaaattatctcttatcaccaaacaggctgcgatgctcaccggctggagggctgaggttgtctttcaatccactgatgatggggagggggcagggaagggggggccggctgacaccaaaaataaaccggcggagcggggatggttgtcgcaaggggcagagcgaagttgtcaggcggcgagagcttgtgaggcggcaggatgataatgtggcatgacacttctgaaatgagcggcccgttgccatggtgagcagccaggagggaccggctctcccgaggctgaaataaaacacgctttaaatgatgtttgattagaatttagatcatgtaaccgaatacctcagtcctcctcttccccgtgcttttctgcttttcttcttttctcctctattccccttttcttccctctgtccccacctctccccaccccagggcagacacagatacactcacacaggcacacacccacatgcacacacatgcaaatgtgcacccagacacacacatgcacctgcataagcgtgggcacacacatgcagatgtgcacccagacacacacatgcatgcgtaggcacacacacgtgcacacacatgtagatgggcacccacacacatgtgcgtgcgtaggcacacacgtgcacatgcaaatgtgcacccagacacacatgcatacatataggcacacacacatgcacacatatgtaaatgtggacccacacacatgtgcatgcagagacacacacatgtacacacacgcgcaaatgtgcacccagacacacacatgcacatgcagaggcacacacacgtgcaagtgcacacctgcacagacacatacacatatacacacctacctttctcctctcctcaccccagttgttccatgcctcagttggaccttgaatcaaaaattccagctcagagcagatgctgaggatgccttagagggccacagcactgatccagggtcaagggcttgagtttctgttcttttgctgtgataacaataatattaaaacaatacaaggccgggtgcggtggctcatgcctgtaatcccagcactttgggaggctgaggtgggtgaatcatgaggtcaggagatcgagaccatcctggctaacatggtgaaactccgtctctactaaaaatacaaaaaaattagcgaggtatggtagcacacacctgtagtcccagctacttgggaggctgaggcaggagagttgcttgaacccaggaggcggaggttgcggtgagccaagatcgcgccattgcactccagcctgggtggcagaacgagactctgtctcaaaacaaacaaacaaacaaaacaaaaaacaatgcaaatactccaagtcccttgtttgtgcagccctttattcttcataaagctcttccaaatgtaagttcatattttgttctcacacacaagaagtgagaacaaaatatgaacttgcatttggaagagctttatgaagctttttctctgatcgtacccattttctagaggaggagcctgaggctcagagaggccaaatgtcttgcccaggatcgtgcagcgggcaagacgtgaacccggcacttccagagtctgctctttgggctcttgggggaagcccctgtaggaggaagggagcacagccagctctctgtcccctggatgctcagacgtttacttgtccaacatgttttgaacactcactttgccattggctttggcctgagtaaaccaaccaaggtatgggcagagagaccctggcttgcatctagagggttttgggacagacattgtgatgttctggctatatgcccccactttctggtgtagtaacaggtttgtgttatgtttgtggtgtttttccagggcatgctgcccaggtggggaagacagccagtcccagggacggagggtgctcccatgattctttgctttcttgcgttcgtttctttctttctttctttctttctttctttctttctttctttctttctttctttctttctttcttttctttctcttccttccttccttctttccttcctttctttcttttctttctttctttctttctttctttctttctttctttctttctttctttctttctttctttctttctttccttctttctttcaagatagatggggtctcactatgttgcccaggctggtcttgaactcctgggctcaggtgatcctcctgcctcagcctcccaaaatattgggagtatgggtgtaagccaccgtgcctggcttctgctgtgatcattgagagtgggtaacagagggcaggctggtgctgtgcaggctgggaagcagggttgctccctggaatccccattgttcgtgcccccccagagcttctctggggccctagcgaggttgtcatcatcctattctatgacgaagagacatagcctgtcccggtgtccgtcttccctaacagaccagtgtctccagattgtctctctgtttaccagccggtccatcctttcattcatcacttcgccggcacacacttgttctgcacgtgctgtgcacctggctctcactagtcagacctggtctccaccttcacaaatgtggggtttgtgggtaggtggcctggagacatacacacacagacacacacagtctccttcagtgcagagtgagaagtgctctgatggaggagggagcaaagtgctctcggagtgtcaaggatgggctgctccctgtctggtggggatcaaggaagtcttcttggagaaggtgacatttgaagaaagagtaggaatttcaggtagtcaaataggaagaggcagcctgggaggagacaccttgatgtgtgagagtccatccttacccaacaggctggaagctccctgggtcagggaggagggtgtgtctctcccatcagactaagatttgaaaggcagaagctgagcccctgtgcacaccctcctcccaagactggggattccttgagggtgagttgatatctcctatttctctcatcgtttgttccaaattgcaaggcatttgtttctttgcatgtcctgttagttctatgatagcagggaacctgctttatacattgtgtctccctagtgtctgtcacgggacttgttctatacaaaggagtaaatattaggccgggcgcggtggctcacgcctgtaatcccagcactttgggaggctgaggtgggaggatcacgaggtcaggagatcgagaccattctggctaacaaggtgaaaccccgtctctactaaaaatacaaaaaattagccgggcgtggtggcgggcacctgtagtcccagctactcaggaggctgaggcaagagaatggcgtgaaccggggaagcggagcttgcagtgagccgagatcatgccactgcactccagcctgggcaacagagcgagactctgtctcaaaaaaaaaaaaaaaccaacaaaggagtcaatatttattgagtacttgctgcgtgcctggaattgtgctaaaggcttcgcatgttattaactctttcagtgcttacaacagccctttgagtcaggaaccgccactgcccccattgtacagatggagaaactgagtctgggaggttaattagtttgtctgaggtcacataattagcagttggcagagtcaggacccagtcgtaggtggtttggctttgaagcccatggtctcacccctgaactctcatacacgggccttgattacctgtgagttgggtgggctcagcttccccacatgacttggaggggcagcacctcatggccagctccaacagcctgggcgccgctagctttggagaaactcctcggagctttcaaggcagtaaagagtgagtgtggagtgtggtgaggagtgaggccactgacaagtacccggggtccccaagggagagatgggggtgggagaagcacacaggtctagagggtttagctagagttgggaaaggactgaggaagtggggccacagaagttgacagaggcaggtgggcaggggcagtcattgcctagaaccaggtctcccccttcccttccccacctctgtccctgtccggtcatggtcaacacttgaacccagtccttcacttccagccccacagccctgccctcagctggccttcagccccctcacccggcctcccaccttcctcctctggccaccagttagcttcctacagcagattcgattgctttattcctgtgctccaagaccttccatggctctgcgtgacccccgccaggcagcagcccagatctcaaggctgctctccagccccgatgtgatctgatcccagccgtcctttctggccttgcctctcaagtctgttcctggtgtcttttctcatctgcgtgtgccctctccatgaatccctcactcaacccccagtcgaatgcctactgtgtgtgtgtgtgactcagctcaagtctttcccagcctggagcactttccctgaccactccttccagaggcgtgtctgttatgtgcagttcagagttccaagttgtcaaattatttcaagttctttcctcaactcgactgtaagctcccggaggaggagatcgtggatggcagcgataagtgtgtgtctgtgcctgctaataacaaccacctattcagtaccaaaacaattcacatccaaggattcccagcctttgtgctgcgtctccctccaaggaagtttctgtgtgtttggtctgctgtgggccccagttgctggggagggaggaaaattgaaagaagcccccaaatctcagattagtttccatcaggcaaagcagagtatttctcccaggtgaaaaggatagaagtggataaaggcagaagggagcgcggggagaaccaggccgctgttggggctgaggctggtgaaggttgtggggagactgagacaccgtggccatgctgccagagggagcaggagatggaaaaataggactctaagaagttgggatttgttttaggaatgtaaatgcccatttacagatgctttggtcagaactggagctgcatttcagtgtcctgtggtgatggactgatgtcttctctgaatgcagcaccatatagagactggccacagggtgacccagaactacacaggttatgctgtcacttgagcataaccaatgcctgccaggggaggccaatgcctgccctgggccaggagctacatttacacatagcaacctgaactggatgccacctgaactgatgagaaaactaagcttcagagaatttaggaacaccgaagggagagaatgaggaggaggaagagagggaaaaaggtagatctggccctgactcagaactgtaactcttgacctctaatctgagagctacatcttagcgtggggccaccatggccattgagtgccctgctgtgggagacgtagtaggctcattgggctagaaaatgagtatatcagcttagctatgtccttggggtcagaggtgacccaggccaaggtctctgtagctattaggagccagatgacagtttgattcgttagcctggggaagccctcttgtgaagcctgagatgggagggaatgggagggtctgggagacgtgcagcagggtgggccggggccattggattgctgaccatgaggacttgtcaccatggatgacctccattgctgtaccagtgagcctcctcccgttggcatgggtagccttattgggaagtgggcacctttattaactaagaatcacttcatttagtgagtgaggggtggggcttggctcagcataatacggtgggaagcagcccaggctttcaggtcaggaaacctgggttctaggccccatttggctgcaggggagtccctgaacgtcactgtgtgcctcagtttctccttcataagttgtggatgcaaatgcccattctgctcctctcagaggatgctgcagacatgacagtgatttgaagggtcaagttcactgttcaaatgcaagctggaggtgagaatggggtcagtagctctttagcgagatgaagcctctgaggacgggccagtcacaggctcactgatatagtttggatatttgtccctgctgaaatctcatgttgaagtgcaatccccagtattgaagatagggccctggtagaaggtgtttggattatgggggcggatacctaatgaatggcttgggccatccccttggtgataagcaagctctggatcagttagtccacgtgcggtctggtcatttaaaagtgtgtggcacctcccccaccccattctctggctcgctcctgctttcacatgtgacgtgcctgctcccccttcaccttctgccatgattgtaagtgtcctgaggcctccctagaagctgagcaggtgccagcaccatgcttcctatacagcctgcagaactctgagccaattacacatcttttctttataaattaccccatctcaggtattttttttatagcaaatcgagaatggcttaatatgctcatgcttggtgtgggcagccccatcagggtagatgtcattagtgagatccccatagccgaaggaaggggctcaggcagggctggaatctgtagaaggatggagccaggagacaggatcctagcagacagggactgtcatgcctgctttccaggaccccttgggaaaaagaatattttgcatccctatctcccgtcaattgcctgggggccccacaaagaatagtaacagaaataataacaaaagctcacatgtattgagggtttaccacatgtcaatctctattctaagcactttacctgcattgactcatttctgcctcacggtaactccatgtaaaggtactatttttatccccactttactgatcagaaacccaaggagttaagtgacctttcttaagcagttaagtgacttgtaagtggcagagtcatgactcagtccccgatggtccagggcttgtgctgtgttatgctttcaggaagtaatcctgaatcctttatgcttcagagggtgactccttggctacaaagactcattagtcccacatccaacagcaggcaggggtccccaccttccccaccaaacagcaaaacttagacatgaatcccagccctggctgttattcgctgcttatgcattcctggcaagtgagttcatctgtaaaatgggtgaacaaacatttgttgaatacctgtcatgtgccatatatgtatatttgagacagagtattgctttgtcgcccaggctggagtacagtggcgcaatttcggctcactgcaacctccacctcctgggttcaagtgattctcctgcctcagcctccagagcggctgggattacaggtgcctgccaccatgcccagctaatttttgtatttttggtagagacggggtttcaccatgttggccaggctggtctcaaactcctaacctcaagtgatccgcccacctcggccttccaaagtggtggtattaaggcgcaagccactgcacctggccaatgtgccaaatttaattgaagcttcaccataaccttatgagacaggcattatttcctccattttacagccagggaagttgaggcacagaggggttaaacaaattacctaaggccacggtgaaacaggctgaaacggaacccagcctgtctgattcagagctcaggctctcctcctccttcctcagagtgtgagccacaaagcctcaattcctggggtgataataagtatgaaaaaggaggtttctgtgatcaactctgcttagggaaggctgtttgcaacaaagttaaacagactatttgctgcagaacttatcagagcctttattatacttttgcacactgggtagtcccaagagcagagcagagttagtatgaacaaaatctttgctgtgaacaagttagttgaggagaaagaatcttgggggagaagtgttccttggagctcactttgggaaatgtacttcatcctgctgcttttctgacaacaacaatcatgaagacagcagcaatgttactaacatcataaatgggatcatccgctggttgcagaggctcatgcctgtaatctcagcactttgggaggccaaggcaggaggattgcctaagcccaggagttcaagaccagcccaggcaacatagggagaccctgtctctacaaaaaatttaaaaattagccaggcatggtggtgcacacttgtggtcccaacatctcaggatgctgaggtgggaggattgattgagcccaggaggtggaggctgcagtgagccaagatcgcatcacagcactccagcctgggtggcagagtgagatcctgtctcaaaaaaaaaaaaaagggttggggggccaggcgcagtggctcatgcctctaatcccagcactctgggaggccgaggcaggcagatcacttgagatcaggagttccagaccagcctggccaatatggcaaaaccatgtctctactaaaaatacaaaaattagctgagcatggtggtgggcacctgtaatcccagctacttgggaggccaaggtgggagaatcacttgaacccaggaggtggagattgcagagagccgagatggcaccactgcactccagcctgggcaacaaagtgaaacttcatctcaaaaaaaaaaaaaaaaaagggatcatcaccatcattatcattataagctttgcctcaattgcaatgttactttctgcctatgttatttgggaattttttcaggacattgccctcctcattctcccccgatgttaagtgccctgattcctttcttgtgctcagggcagtttaagcctttaggtttcacgttccttgtgcctggatcacctctgttctctgctccaaccttttgcctgggctgtccttctcaggttgtcctccctttctccccttcccagccttgttcttggaggaaagtgagagaggattggaggggaagcgatttggccaggggcatgtggtatgccctgccccagcctctcctgcctcctttcccacagggcttggctctatagacctcccttctgagaaaccctctctgatggcctcatcccagggcaaccacttagctactcggggcctctcttggtcttttgatacctagtctatattatatactgtgcaaagggttgggttttttttttggtgtactatatttattttttaaaacacagctttattgaggtatagtttgtgtaccataaaattcacccattatatttatatgaaaactgtttattataatcaatattttacataaagaaaagagcatgagtgagtacacacagagggatgaatttttacaaaataaaaatatctgtgttattagcacctgtctcagaaacatgacaccttcagagagatttattaaaaacatacaaaccaatccacaagactttccctttcctccctccgtcctgccctgctctttctcattccttccttcctccctcccttccttcctctttccttccctcttttttttttttgaaacagagtcttactctgtcacccatactggagtacagtggcatgatcttggctcactgcaacctccatctctcaggttcaagcaattctcctgcctcagcctcctgagtagctgggattacaggtgcaccaccaagcctggctacctctttccttccctctctcccttcctctttcctctgacaaggtacccaggcagagccttgagctgtaaagggtcagatgttgagtgtgggcagtgcccaggcctcctgaagcacagatcattccttctccctccctccttcccttcccttccttccttccttcctctaacccctttatgtctcccttctttcctattggctctcattccaaataccatctggggtttatagtgagaggcacagccagagtaaatgtaaatgcctgccaaacagtgccctagaaggcaaggagcgatggggtcaggagctgaaagacccaagtcctggcttggccgctgccagtttcaaggcctgaggcttgtgaccacacctccctgtgcctcagttttctcttctgtgaatgagaattatgacatgactgacttcaaagggtgctgagaagatgaaataaggtattttgcccttatgcctgccacgtggttaccatgtgcttgcatgcaggaagctctcagtggcacctggcagacaattgcatttcttactaagatgagacacagatggtgagaatcattgccatttattgagcacatactacctgtgagggctttacctctcatctgcacaaccatcctgcaaggagagggtattatctccagtttacagatgaagaactgcaagtcctgaagacgtaggttgctaagggttggagctggagcttgaacccaaggagtctggctcgagtgcccatgccctaatcactgggcaagccttacatcaatttctcctggaccctttgaggtctggctgtagctgtgagccaagtatggttctctcccaactgctaggacaggaccaggccaaccacagggccaccccttggcatgctgagaaatcgcctaggggcagggatggggttttgggaaggggatgaggtacccaggcagagccttgacctgtaaagggtcagatatcgagtgtgggcagtgccctggccttctgaagcacagatctgcagctccagggagaatctgggactctggtgcagggcgccgtggaggcaggagtatggccctgtggggtggtcatagcccacagccctggagcatcagagaagagcagcctgccccctgcagatcctcctcatcctgcaggccagtgtcaccggaatggagggtgtggagcaggcctggcaggacatggctgggcatgggggtggtggtgacgcctcttcagctggggcaggactgaggcagagtgacctgcccaccacccatgccaagtgctcaggaaatcctggggcaaggcctggagattcccactggtggggtctggtggggaatattgggggcatccccagtctggtgcctcagccagcccctcacttcttggtggggttctgcaggagcacggacgtcacctgcccttttgctggccttgaccatccctgccctgacctccaggctccctggggccagtccagacatctgtatccatcttgccccaaactctggagattctgacaaatttcctttcattgcttccagccgtgttatttaaagtaattaaccttaatttataaatttttatatcaaactgccttttaacttttagaactggcaggaacagccttatccctgggctcctaatagttctccatttaatcaaaattcatccatcaggttccagtgttaaatcatcttttaattgggagttacattctggttaatagttttataattcgcctcctctaatagtttttaccacagggatctcgactccatttttcctgactctattattgctggcatgcgattctgcggggatggcttaacgcggccctgcctctctggcctctgctggtcgcctcttttgttcttggtggtctcattaattcctgagaagagttatccttcctcctcattactagggcagagctgctgtcctcttgaggggcagccttctgatttctgcagccttaggagctctggccaggagatctccaagagaaagctggagccaaagaaagggacagatggagacagagacagaaagacagagagaaacagagagagagggaatatggagaggaaggagcacgtgggaagccggcaggccaggaccctagagagagacagaggcgtctgggagtggactggctcctctcccggctcctgccactgcccctcagctcctgacttcctgggagtggggggccttgggtgaggcaggtgatataggaggaaggtggccctacctgagaccccagggtggcctggaggagtggctggggctggaggacaagcagagtgggcctggaaagtccttggaggtcagcaggcagggaggtcccagtccactccctggtcactctgagttgctcctgtgcatgttacagcatcaggatcatcacagatgagccggggagcctcctggcggccaagaggatgagggtgtgagatcccaagatcagaaaggagagacctgcgggagacagagaaagggaaaagtcaagagtgagaaaagaaaggagagggaagagaaggagggggagagaaagggaaagaaaggaagaggccaggtgtggtggctcacgcctgcaatcccagcactttgggaggccgaggcaggcagatgacttgaggtcaggagttcaagaccagcctggccaacatggtgaaaccttgtctctactaaaaatgcaaaaattagccaggtagggtggcgcatacctgtaatctcagctacttgggagactgaggcaggaggtggacttgaccctgggaggtggaggttgcagtgagctgagatcgcaccactgcactccagcctggacgacagagtgagactccatctcaaaaaaaaaaaaaaaaaaggaaggaagagaagaagacagaggaggggtgaggagaagagaggatgtggtcaccttgtcagggagtcctggcctgtgaggagatgggcctgtgtgggtacatgcatatacacgtgtgcatacatgggcactcacacaaacccacacatgcgcacaggcctgaaaccagtcctaggaacagctagtgcaggggtgttgctgggctgggacatggcctggagcctgggggtgggggtctctgagaaggtctccaggagatgtgagctgcgaggggtcagggaagggccagggaaggatggaagctgggctgaggccactgaagtgagcttccctggggatggagggcctgggtggctggcgtaccttgaagtcatgtcttgctgaatctgtagtctccacctctgattggtgactttgcaagacagtaggtctcagccctggctgcacgctggagtcacctgtgggtgtttaaaaatcccagtgccctggcctcacctcacatgctgtgatggttttaaagtagatccacaaatcctttgagcctcctcccttctgaagatggagtctaattctcttcccctagagtgtgggctccttctaaaacacaaacacagcggaagtggtgtgatttaggaggttagggcagggaaggtactgaggcttcctctctgcactgctttggatctcttgctcagaaggcagccaactgacgggtcatgaaaacactcaagcagccctgtgcagaggcccatgtggccaggaaatgaagccttttgctggtggcattgagtcatcttgaagcaggtgctccagcctgggctgacgtctgaactccaacctcaggagagatcctgagtcaggaccacctggctcagctgctcctggatttctgacctcagaaaccacgtaagctcctaaatgaccatcaaccaataagtggataaagaaaatgtgagatatatatatatatatatatatatacacacacacacacacacaccatggaatactactcagccataaaaaggaaagaaataatggcattcgcagcaacttggatggaattggagaccactcttctaagtgaagtaactcaggagtggaaaacccaaacatcgtatgtcctcacttataagtgggagctaagctatgaggacacaaaggcataagaatgaaacagtggactctggggactcagggaaagggcgggagtgatgagggatagaagactacacactgggtgcggtgtacactgctcggggtatggatccaccgaaatctccgaaatcaccactaaagaaattatccatggaaccaaacaccacctgttctgccaaaactattgaaataatttaaaaaacaaaagaaaaaaaagaaaccgtgtgagctaatgtttgttgttcttttaaggtgctaaattttggggggttatttggtatgcagcaataggtaactgacccacattcattccatcagcatcccagggggtggggctggacacaggtgtgttttaaagctccacagtagtctagtgtgcacccaggttgagaactgctgccctaatgcctgtgtgtgcatgacagtgtgtgcctgtgtacaggccacatgcgtgtgtattgatggaggcgccgtgttccacttttgtgtaacatttgccagggcacatttgccagggcacataagtacaagccccgcccaccttgtgtgttcctctcggagtgcatcagtccctctgtcccaggtacttgtgtcagggtgtggctcaagaaggactggggcatggaaggagccttggaggttttgtggccagagtcacatgggctgttcaccacttcctctctgtgtgccctctctgagccataaagctcccatatggggacctgcagatcagcactcttcccgagacttcaaggaggcagtattggagctggtggatgcctcctgggctggttttggcaaagttttggtagccctgtcacttttgttataatggctcttggcgtaatgcaatttgacctgcagctgtgcatacaggagagcaatcaaatgtgtggtttcctctgcaggacctgacctgaaggagggtctgcactgggtggagggcaattttagtcatggctgtattagggtttacgatttaaggccagttgtcttggcctctgaaatgccagctggctcagattggcaggatgaggagctggtcttccacactggagagtaaagatgttgattctgaagcaggaagcacaagaactttctactttcgctgaggcaggctggtggctccagctgagcccagactcctcccagctgtgtgtcctgggctgagcctcttatttttgctaggcctcagctttctcatctataaagtggaggagcaaatgatctaccacctcttgcatgtgacatactgtgtctccccaccacagcccctgtcaggctgctgggtagcctaggagagggaccctctgaccctcaaacacagcccaatcctcaaggctgtgccttccgttccattggaaccaacttcaccctcagttacccccactgaggcctccggggaaggtgggaagaaaagaaagggtcaccacacacctgcctttgccctccctagcagggagaaatcagggaggatgtagggtggaggaggagcttgatgcccaaagatgcttgggtttggagtttcttggtgggtgaaatacaatgggaagagaaggagaaggaggtagaggaggaggaggaggagggagaggagaaggcagagagcagcattggttgcgatcctgccatgtgctccaggagcactctgctcagaccttccagcccattgtgacgtctgagtttcatgacaataaggatgattggtgccattttacagagcaggaaactgaggctcaggaaggtgaaggaatctccttgctcagtgtcacatgggctaaggaatgcagatggaaccagggtgggagctccggcccagtgactacaaagcctgggcattactgtggggactcgagggcagggagaggtccagtccttgcaccaggcaccttctcccagtggggccactggccccatttcttagaggctgtactaggttaggggtggatgacaagaatgatggtggaagtgagaggtgcccaggactgcccctgaagcgaaaggatttaggttagactgtgggaagcatgcgggttctgaaagcccagggtggcaggacacagggagcccgtgctgccttcttccctgggacactcaggagctggtcaggagctgaggctcccttcacacctggtaggcctgagcctgagaagagttgagggttggcccttcagcgaggcagggggattggcaggttgaccaatgcagggaaccaccagcctgtgtttggatggacagactacctctgattctgctggtgcagttagagatcaagttcacaggcttcagatatcagagcttatagttcaggccccgtcacttgtgaacagagtgactttggacaagccccttaacgccctgtgcctcagtttccttatctgtaaaatgagggtgaggaaaaagctgtttcatagccagtgagcatgctaaatgagataagcgctttatagtatttagccaagccccgggcatagggactcacacagtaagtggtgactgctatcatgaactgtctgggaaggcaggagggggcagcttgctccagagcctggagtcccaaccgggtggcactgggtggtctggcattagttttgttaccagaaagtggtctcaatccagaccccgagagggttcttggatctcacacaagaaagaatttagggggagtccataaagtgaaagcaagtttattaaggaagtaaaggaataaaagaatggctactccaggccgggcgcagtggctcacgcctgtaatcccagcactttgggaggccagggcgggcggatcacctgaggttgggagttcaagaccagcctgaccaatgtggagaaaccccgtctctactaaaaatgcaaaattagccgggcatggtggcgcatgcctgtaatcccatctacttgggaggctgaggcaggagaatagcttgaacccaggaggcagaggttgcggtgagccaagatcatgccattgcattccagcctgggcagcagagcaaaactccatctcaaaaaaaaaaaaaaaaaatggctactccatagacagggcagccccaagggctgctggttgcccatttttatggttatttcttgatgatatgctaaacgaggggtggattattcatgcctcccccttttagaccatatagggtaacttcctgatgttgccatggcatttgtaaactgtcgtggcgctgctaggagtgtaggagtaaggacgaccagagatcattcttgttgccatcttggttttggtgggtttgggccagctcctttactgcaacctgttttatcagcaaggtctttatgacctgtatcttgtagcaacctcttgtcttatcctgtgacttagaatgccttaaccatctgggaatgcagccctgtaggtctcagcctccttttacccacctcctattcaagatggaattgctctggttcacatgcctctgacatttctgactcaccctttctgggagaccttgaaaaaaattcaccaaacctctctaggtgtcagtttctttaattgccagatggagacccaagtccctgttcttctctggggacccagaaatgatcggtgtctacaaatgtgtttgcagatgttcttggcctgagcagatagagtccacccttcactattcagttgggttacctcatgggtcccccataataaacctgttccccacccacacccataataaactgaaaaaacatttatttatttatggttttgagacagagtctcactctgttgccctggctggagtgcagtggtgctatcttggctcactgcaacctctgcctcctgggttcaagcaattctcctgtctcagcctccagagtagctgggattacaggcatgtaccaacatgcctggctaatttttgtatttttagtagagacggggtttcaccatattggtcaggctggtctcgaactcctgacctcaggagatgcacccgccttggcctcccgaagtgctgggattacgggcatgagccaccgcacctggcctgaaaaaacatttattgaacccctctcttgtgccaaggcactgtgcccaggccacggaagttacaaggaacacttgttgggtgccacctctgtgttctaaaggatgcacaaccatctgtaacctgcacaaaccaccctgtgagagagatgtgacaatcactcccatgttacagatgaagaagacgcagctttgagcccagaggtaactagctgaaggtcacgtgggaagacggtcaaccagctgcagtgcaaacgcacctgcttctgcctccaaaccccttcctgtgccttccatgctgtcacttgctggtgattccacagggcgctcctgggatctcatgtgtattgtcatatctgcaaatgagcaaccgagatccccagaggttaaattcctggtccaatgcccttccactggcaggtggccacatcccctccaaactcagtttcctctgaccccagaaccccggctccctcctgcctcagtgacaccctcccaccatgggacacgatgcctttgggtcctactctctgttttcctgtttcctttgagaccctctgtgccccttgaatgaggtcttgatcatcagggactctgccagctggggagctttgtaaggtgtagtcaccctgggagagtccttgcttgggcccacagtcttggggactgaggtctgtgcagtgacaataaggagtcacaatcctccggcacattgtccaaccgtggccttttcctctgacacgtaaactctcattgaacccatttcacaggtgaaacagctgatgcctgagttgggccctttccctttcatcaaggggctggagcagctgagaccaagtccctgacatggccccctgggcctggctggctctgtctctagtagaataagaggtgagatcagggacagagaaagagggagcaggaagcagagctcaaaagcagagctggcctcagggttgcagagcctatgtgtgtttgcagggtctggcgcagggaacagagagatggattggtgcttctggtccccatccctcggctcccagagacaggctggggttcaccctgaagtgctggatcctaatggatgtcccgctgtgggcctgagctggccgctgatcagcttcctgccgcactttgctaccttcccagtaggactgtcactaggcccaggggtgatggaacagctgagggacaaactggggacccggcagcagaaaggggagcagtaaatctcagggctttcagcactgccagttggtggagcggtgttagaacccctctggccttatacaaccaagtgcttattttccccagagggaagcgggtggtggggaaggaatagaggggaagagacagaaggacaggaaactcactagagaagacagagacagagcagggagtggaggaaggagcccagggagacaggctgagtctgaagttgcagatcctgaccgggctgctctggagtggcagccagcctcaagggcctccatttccatgggggaagaatttggactctgcttcatggggagcaggcctctgtctcttttggggatggagagggggcagttagagcttccccaggccaggggccctccccttctcccaccccacatccagggagtctcatgcttcaccccagcccctctactctctgactcctgacctgggagaagctgctggttcctggaacacgattcccaggtcagtgaactgccaggcttcagccttagaaggaatcatgcctctgtctcacagatggggaaaccgaggtgctggcaggggctttggctcagatttgtgtagatgaggctgggctcctctccttctgccacagtgcaatgaacagtggcacagccctagcccactgatgccaaatcctggccggtttttggttttctgattaatcctgggaggaggggagacagacccaggcccccttttcactcccagcaccagatagatgattctctggggagaagtgaggcttagaggcaacgagggagcgggggaagggcaggaagcatctatcaggggcctcatgggggtgggtattttatatctgctgttcttttgactcattaccatctgtggggcagaaattatgactctgattttacacgtgaggaaagccagactcaggttaattaaattgtctagggtcactcagctggtgagtggaggaaaccaggattcgaatccaggtctggccccaaagtctgggctctttccaaactgccatgtgcatggggtgatggatggacatggaaggagagcggctgtcatgctctgttcccccaacccctcaaagtaggctggagagaggagcacaggcagccggtgaggagattgtggggctcactgggacgggatgggcagacactgcttgttgtcagacctggcgaatcttgcctggaatcttggctttgccactctgcatctgcgtggcgccaggcaagtcccttctcttctctttgcataataaagcaagcggcttcgaggtgtctccctgatgtttcatgagtgaatgaatgaaaaacaaatgaaggtgtcaggaggaagcacacctattctttttttttttttttgagacggagtcttgctctgtcacccaggctggagtgcagtggcgtgatctcagctcactgcaagctccgcctcctgggttcacgccattctcctgcctcaacctcccaagtagctgggactacaggcgcccaccaccacgcctggctaattttttgtatttttagtagagacggggtttcaccatgttagccaggatggtctcgatctcctgaccttgtgatccgcccacctcagcctcccaaagtgctgggattacaggcgtgagccaccgcgcccggccagaagcccacctattctaactagagtcaaaggctggagtgccaacggtgcctcaggacaggtcctgcggagatgagcccctgaacctctgcttctctcaacccacttaaatgaagccccagtcttccccagacaccacgtggaggccgagaaacccactgatagatggtgggtgggggtggacatactggtggccccagttggcttcctgtcacaccagggcatcccctcccatatgaagtcaccgtgagatctctctatcccagctaggttagttgctcttaattaaaccaattgttggacttaatacccatcccattaacatgtctcccagatctattaattatgaccagtggaggaagggcacaggagctttgggtggggatgcaggggtttgaaaaccaagccaatctgcctcacagagaagagaaggggcaagttcattcctggatatgagggcaatctggctgcaacatttgtcaccccgttgatcaccaggattgatttgggtgatctggctggctaggcgggtgtccccgtcctccctcactgctccatgtgtgtccctgctgaagctgcacacttggagaggatgaccttccctgatagaggaggactgttctttggtcaagggtataccaggagctcgactcgcctgctggaacctccgaacaacctctcaggttcactccttgtttcctcctgggagtcttggaaacattcattacagcctcagaattcctggaagcctgctgtgtctgcatcccatggggtctaactgaggccctctggccaccatgacccttgggacccctttcccatttagctttctcagagccactggggcagggacaggggaggtggaggtgactgtcattggtgcaaggtaggggccaagaactcatccgtggggtcagaacggaggctgagtgggaatgaggattacagatggagagctggagttaccccagctccacccacacacctgtgttcagaatgttccctctgcagctctttgggaccaggtagggctccctaaatccctctgtactctgatcaggccttcctggatggtgggtggacttagaggcagatgctggacctacgcagggatgctcagactattagtaggccctccccttgtgccttctccttcctccttccctcccaactgggccctccccgctgcccccagtgtcaggggccagccagggcaggaagggaactagggtggggccctcagaggtgcataaatcattattggcgaagacctcagccctgagccgccgggtggaggctgctgctcatggttcaggccagggcataaatcataattcccctacaatagatcctttttcagccgccatcaggaaaactgtgttggttttatcgattttttgacacaggggcctaggcagcgggcggctcctgaatcattatgaaatgaaactgattaggaattcatggaatactaaataaactttacgagcccgttgtaagttttttgatgcatggggagcggaaaatgaaaactaatgatataaaaattacacagcgtgctgagtattattatactgctattgatttgcttcaaactgtacatcaaaatcgaagagggctggggcagtgcctgcagcgaggctggggatatttgggctcaccagggctggagggctttttttttttcccttttctatttttatttatttattttctttctctttcctccagcctcctgctctgtaatctgacatccttttccccacctcttccagcgaaggccccggggagccgcctcttcatccactcacaggtcactcccttcttagctggaacctggaccctggctcaacttgaattccttggcctcccactggtttctctctggagctgcatttttcaacctgtgagtctctctttccccttccacctccccaccgtttctctggggaaggacagtgtgcttcagggaaatgaggtggagattcatttcttgtgtagccccttgctgtgtgacctttggcatgttgctgtgcctctctggacattgttgtggatagcaaaaacagtggactcattagatcagggcctcttaaagcatggtctgtggacaggccactgtcgtcttcacagcttgtcaaaaataccaattcctgggcctcatccttagatgaactgacttcattctcagaagggggaatctggggccagttgcggtggctcacgcctgtaatcccagcactttgggaggctgaggtgggtgggtcacctgaggtcaggagctcaagaccagcctggccaacaggtgaatccctgtctctattaaaaatacaaaaattagccaggcatgatggctcacgcctgtagtctgagctactggggaggctgagagaggagaatcgcttgaacccaggaggcagaagttgcagtgagccgagattgtgccactgcattccagcctgggtgacagagtgagactccatttcaaggaaaaaaaaaaaaagaagaagggggaatctgttttataagttcccacgggactcccgtgcactgcaaatgctgatctgaagagacacatctgagccacttatcccattgggttgtcagaggtggccttaaagctgtgagtattgccttctatattagtcagcttttgctagtttatggtgtagtaatgaacaatcccaaaatctcaatggcttatagcaacataagtttttttttttttgttcatcatacatatctgctgcaggttgtttgtgactctgttccatgtgtcttcattctggggctcgggctgaaaaagcagcttcaatctggtggcagaggggaagagcaagaaagatggtggaaacgtgaggtccaaaggccttagcttgggcatggtctatgtccctcctgttcctattccatttgctgaaaggagtcttatcgccaagtccaacagtaggatgggaagtacaattctcccacaaggatgggtaccagggagaggccctgtagggatgggttgggagagaagggagtggattttttaacacgtcataccacacccttctgggcttggtcttgggtccaagctgccctggaatttggagttcggggtcttgtacttccactcgacacatccctgtgtctccatagcaactgtttactgaccccttcctctactccctctgagaccctggccatcctcctggggtcttcagtgggcaaagcttcggccctctggctcgaagcgtctctgtttcttgcatttctgcctgcatgctggggaggcctggaaacactcaccctggttcctcaatagaactgctgtgacaattagaattcttttgtcaaactgttctttatctaaattcagagagtaaatttagattttgcgtattggattttcttaaagtggaatgcgttcggtagctttctttttagcaagtgttttactttttcacaagagatggttcacaccagttatgtcttttgctggtattctttttttatcagattcaatttcacatcagcctgagtcccagaaaggttgatgtcttcccctggacacacagcatggcattcccagagccatgttgctgcccagatctggacatgccagggcagcctcctctggaagcccatttacgcttgaagtccagggaccacttgtgggggacccacttgctcttactggggtctgggagatgtcagggacgtcagtggcacaagcttgacccaaggggacttcagtatctctctgaggacatagaaacacactcacactgacactcacatactctgcatacaaatcttttcagaaccagacaaagtggataacacaatgatccagaagggaagcagagtgcaagtcttaaggtttgagttcaaatttcagtcctgcccctaactggctgtgtggtcttgcataagctacttcttttatctgggactccattttcttccaccgtcaaagatgaatttaaactcaatctacctgggattggagtgggcaggggtgaacacactggcacaattcccaccagatgttgaggcctatacagtcctaactcttttcagtttggagaaagatgctgatggaaacccaaactcaaactggcttaagccaaaaggagaagttattgaaggggctctaagtcacatctggaactttggagacagctgagataaagcccaaagctgggggtgagggaccacatgtcaggggagcttggagacagccatgtagcctcgaggctgccctaggcgaagggaaagagtgtccactccactgtcggcatcccatttctgcaaaagcctggctggtgaagtttcaaccaggtgacccatgagcaaaactggtttctgaaggtacagacgtgggttcacagccagttccaccctttcgcagctgtgtgaccatgagccagtcccccactgtttctgagcagagtttctgagggtcgagtgtgaaaatgtaagtgctggctccaccccggcttccagagagcgctcaggcaagactcacatgccctggggctagaacctaccctggcatgcaaagcttatcccctgaaccaacatgttggcttgtgtcttcccctctagtctttgatcaagggcagggccacgtcatatttgcggttgttcccagtcttggcactgtgcctgctgcgtggccgtataatccacgaatggctgtggaatggagctacagggagcggcagatgggatccttcacacagcatgtctgcccacgtaggacctgaacatagctgggccccttcagcctctgtcctacccctgcgcccaccctatagccatgcagcacacacacggccagttcccaacgtgtgggtgaacattgcgggtttcactgaagtttttctgggaaaccaggggagcagatggcatcatacagcacactccagcctaatcacagcagccctgggtttctcccttctctccttcgtcatctctcttccaggcagtgctcttcccctcctctccaatcccagtttctttaacaaaaccaaatcctcattttacatccccaatgaagcaaaacaaagccggataggacacagaccacagggctcctgctccaccggtatctcattcaacctcctttatccccatctttttattatggccaaccattttatcctcacgcaggcctctgtgccctgcacacacaacagcttcctcaagctgccctccatgtgggtgctgtgaggctccgagaggagacaggacttgccccatgccacccagcccctgggcagggctcctccctgccttgcccccagagggcctaggttaggtcccctccccaagcccatttgtccctgtggttgggcatggggcaggatgacacctggctggctgattctcctcgtagtttagggtgctacacacactgaattcagatgtggctctgagcaggccgttcattcattcctgaccgtattgactacagaattgagtgctacaagcaaggagtttagctcttattctcctactgatttgatttaatgtttggtttattcctgtccctttctcccccgctctcctcatcagtttgacatttgcatagtgtttccctgcagttttgtcgaacacccatgggggttttgctggcaactccctgctttggcttgaatggttttctttgggggagttttgaactcactgaggcatcttcttcctccctcaccctggagtttgtgttcttcctcctactggggagagggctacataaataatgagacttccctggctctcgccacccgctgcctgagcctgtgggattcctgttgccatgtggccttcaattattcccaagtgtcccgggtgggtgggggcctcaggtgcccatgaataagtctgcccctgcaggtgggtaacctcagcctgcccaccaagcacctctgccaacggtttggaatcctgaggtgctggcgctgctcagccgtgaagcttagaggcacccctggcaggctgtccaggcctcagggcttgcggacacctggttgtcttagtgtgatgtcccccagaatcagacctgttataaggattcaagggaggtggtttatttgggagttgaaagaaagtccaggaaggaatgggaagtgagaccgggaaggttaccactgtgagttgttgagctcaatcctgccccagttctccaggttactcaacatgcctgaaccccccggggtgagagaggatcaagttaggacccctcctcctattataaggctgctgagccaacagaggcagggctcggtggggacagggagagaaatctgcagattcctgagtcctgactcctgcacctggacctctttctccagcttgctctagagtggagctagaaccggtgggatgaggtttcagggtgcagctagatgctggagaggaagcctgcacacaggcaaatgcaccaacagaactggcaggagatggtccagtgattaaagtgatcaggcagaggttgaatcattgcctgtccagggacgctgtaggcagaaggcagggagctagccaatattaaacaccttctgtgtagcagtcctggatatttggaactagaattcaagctccttaagaactggggcccacattttatttacttttttttttttttttttgaggtggagtctcgctctctcacccaggctggagtgcagtggcacaatcttggctcactgcaacctctgccttccaggttcaagtgattctcctgcctcagcctcccaagtagctgggattacaggcacgcaccaccacgccctgctaatttttgtatttttagtagaaacgagattttgccatgttggccaggctggtcttgaactcctgacctcaaatgatctgtccgcctcggcttcccaaagtgctgggattacaggcgtgagccaccatgcccggcctgtttacctttggattctcagcgcctagcactgtgcttggctcctggttgtaaaacctaaaataacaggaaaaatagccaccattgacagccacctactgtattttttgtaaagaatcctgacaacaattgctcatggcaggtactataatctccactttacagatgagaaaactgaggttcggtggggttgaatgacttgcccccggtcatacacttcctaagcagcaaagccagggttgggactcaggtttgtctgccttcccggatccctgatttttctcctccttgtggcatgtcactgcatcgggacggtggttgcactacggatgtccctggaaggccctcttgattctgaggttctgtcttattagctgcacctccctccacccccggccaaccgcaaagaaaaggaaaagtcctttcctcctcctcaggtggctcgtggtggattacttagcgcttgacacggcgtgtctctgtgtcactgttcctgggcggaattaaatcagggcaggaaaatattaatttggagttggggatggaggccgctcctttccaattattctccaccccatcaggcttatcctggcgcaaacaaggaaggaggctggattaattgctttggactctgccccactccggtcccaattactgggccggcttggctcccagcattatgaagcacactgctgtgcaggaaattgtgtgaaattttaacggattttcagatgcaataatggagcacaggattcaaggccagtattcatggggcagccgggccctctatgcctcggctgaggttaagctgtttggggtttctttgtatattaaaggatcatctggttaaccccaaaacccagggccgccagaactgttcagactctgaccccacagaggcagggtgggctcctggagtgcaaggaaacccactgccttcatgataataacaacaccattttttgagcctccgcaacgtcccaggtacttaccccaaacatctttaagcctgagcctttgaagttcttcttatttttatccccctatcttataagggaagaaaaggggactcaaagaggttaagtgatttgcataaggttttctggccacaccgcggtgaagccaaaattggaacccaggtctgtctccaaagcgaccctattttctatatcactctgcctcctccctcatcttctatttcttcttcttaaggatgcattatcacaaatgtggcttccctaccacaccggatatctagagtagagtcctttcttgttctgtctctgcatcttcagccactatcagggtacccagcaccaacaggggcccaggagaagtttgttgaactgcagtcaacctgacccagttgggcatgacccagcccctggactccaggatttataaatggaatgagggggtgggctactgcaacccacagacatctctgggtccttgaggtgaaccccatttgagccatatggaaccgacagagagggtgaggagggggatcacgtccccagcctaactgtgtaacaggggctgtccggatgctccccatatatcgtctctgtcaatcttcaccatgaccctaagagatggccagttattaggaagtaggtgtctaagaggggaaatctgtcctattgtcaaaggcaagaggtagctggtggcttggtcagcagtggggactttgatctctgcatggccagctctggaggctctatggcattgtaaaaatgcattgagagaatcccataaaatctgcccagcagaggcagcggctggagaggaggcaataaccatggaatatggagtggagtggccagtgataacggaatatgagaacccctgccttgggggctaggcatgactgggacacattaggctgctagggatgtatctggggagagtggttggatttgcattctggcctcactttaacaactggaagaaaattccttggagggaattacagtatggcttcttggcccccaccttgaggcatgacacggggggtctatgaaggctgcagaggagcaggaggatagggatagagctggcaagaggggtgactgacttgggggagggggcagtgagagggagtttggggaagtgagtgctatgtagctcacgaattttagactctggtggggccactacatggaaagagaaccaggtgttcatggtgggcccaaagacaaggacactggaggcaatgagggcggaggaatgcaggtgaggcgcacagtgaccatcattagctgtccagttcctacccgcccctttcagcaaaaggagaattaattatgtgcaggggatgcccccttaatggccatcgtttagtttaatttaagaaacagatccctcctcacacccccctcggtcagcagcaccaccattggcagctgcattgattaatggcctcctcttggatacaggggagcagtggttctgaaactggagcgcgcctgagaaacgcctcaaggattcctttacacacggattgcaagaatccatccctgggtggtgtctgataatttggatttctgacaggttcccaggtgatcttgatgctagtggttccgggaacacactttggaaatcactgtagtagagacaggatttcctgtagtctccccaccctctggactcgggaactctgcccttcactgccccctgtctcaagggtcctctaatccaataggggcgggcatagccatctctgccactttactacccacaagtgcactcatctctccaatggtgtgtaagacatgtgcattctctgagcatcatggtgatcccacccctgggcatttctattccaaagagagatggataagtgccaaggacccaattcctggacccctctgtctagatgcagtccctcctgaactggatcctgggggacccacccggtgcaccctcagcaccaagccaacccagaggtgtcccaggaggctggtcccctattctgcagggcctctgctcctatgcaccaggtgagagaggtcagacagctagcatctctggcagcctggtagttgcaggagggggcccacaattacagacctaattgtgtgaccacaggcaggtcccgccccccattgatttggagctggcactgcgggctttgccagggctaccatccagagagcctgtttgcacctgtgtcaaggcgagctcaggaaacctaattagctagtttggtgttttataattaggtcctttaaaagaattcataggtggtgataataagcccatttagaaatctattaagctttgggggaagttgaatagaaaccttgtaactatgtgcacacttgctttctctttcccctcagtgtctcctttctccacttttttctcttctctcgagtccttcctcctgctctctttcccactctgtatcgctggagttactgactcctgcacccatgctaaatgcaatcctcttttattgcttaggaagtcttgcacacatactgaagcatttaatcctcctcacaaccgtcagaggtgagtactttcctgatacccactttatagatgaggaaactggagtgcaaagaggtcaagacacccctctgaagcgacatgtccttaagtcgctgagccagaaatggaacctggtcagtctggccttaccctctcagcaaaactcactttgctcagcctacattgccctactcacccacagcccagtgctcctggctccagtgctcctaccaagctggctgagttgacattttacacatcaaattcctgttttctcagagaccttgtgccagggcttcagcgctaacttcagatgggtctgtaatgaacaatggcttctaataagttttgcttctctggcaactcttcccacctggatttctgacaaggtagtatggtagaagagcaggctggatgctcccctccctctcttcctccttcctcccacccttccccccactccctccctctctgaactggggctgagaagccacagatgaagtcaatcagcttctaactgaagggctcaggggatccccagatgcttccagatctacattagggaccctagccctctcttatcaccccgtttatttccttctaagcacttataacatgacattctctcaaagatttgttcacttattcattcacttgtttattacctatctctccccatgagaatgcaagcgctgtgagggcaaggactttatttatatatatctgattccctggagcctgcattggttcctagcacagaacaggactcaataaatagtgttgaataagcaaatgtgttgaacctgatactcagtttccttatctataaaatgggataataatatctgctctgcagggtcataaagagcttggcacacagcaggtgacccataaattatgctatcctcactccaccccctgcagaccccattaaattaagcactgaaatgcccagagaagctctcctacttaaaaaaagcccttggatgaatcctcttttttagagggcaaatagcttttctttttatttctttatttctttttttaaaatataattgtaaaaattttaaatgagatgaagtctctctatgttgcccaggctggtctcgaacttcttggctcaagcgatccgcctgcctcagcctcccaaagtgctgggattagaggtgtgagccatggtgcctggccaagactttttctgtaaagcaaatgagccctcctagatttatctgctttggaaattgggtgcttttgtttatattggtcttccctaaagtggactgactgagtgcatataactatagaagtgtatatattagtgtcttcctacaatagttactgattatgcagattctgagagcgtaagttcaaattgtgccaccttgaagcataacaatgactgcagaaacatgaaagtcagacatagggctgctgctctttagcactgttggtaaagagcttgcattctgatagctgtgtttggagctaggctcctccacttgctagtcgcaatgaccagtggcatgactagttgcatgactgaatctctccaaggctgcattttttcttctgtagaatgggggacagtggggtggtagtcataatatttgtgcctatcttatagcataacaaccctattaaatgaggacatgagatcattcattcaaaaaaaagcttattgaacacctactatgtgccaagcactgttctgaactctagtaattcagcagtaacacatttgatgctgcataaagcttacattcttttttttttttttttttgagacggggtttcactctttgttgctgaggctggagtgcagtggcatgatcttggctcactgcaacctccgcttcctgggtacaaatgattctcctgcctcagcctcctgaatagatgggattacaggcatgcgccaccacgcctggctaattttgtatttttagtagagacagggtttctccgtgttggtcaggctggtcttgaactcccgacctcaggtgatctgcccgtcttggcctcccaaagtgctgggattacaggcataagccaccgtgcccggcctgaggcttacattctagtgggaaataatgcatgtaaagctctcagaactgtgctctatgaatgctggctagaagggtgactatggctgtacagtgacatggcttatggatataggttcttacctccatagcctcttcaatgggagaagatgtacacatggctggacacatctccatgaaattgatctatggtgagactgaacctgctccactctttcatgaggctggaattctttgcacatgtgtgtgcgtgcatgtgtgttttggaaatgggtgggtgtgggtgaatgttgggccttttcaacctgacattcagtggtcaggtgtcaacctcatctttccttgtacaacttattgcactgtcttatgcctttgccttccatagtctgcttttgctcaccctgttccctcctcccagactgctttcttcctgtctctgcaaactctacccatccttcaaggtcttccttcatgaagctgtccctgaacctctccactgggagaaatccctcccttcactctccatcttcctcctctcttacgcttgtgtcccttccttcccattcccttgatctgtttctgttcccctgctgaaccatggactccttcaggactagatcctgttctgtccatctctgtgccctttgcactgcattgctttacttgaaatagattcttaacaaacatttcttaggcaattaaacaaatgcatggctcagaggatttattttgaatcatcagactttttctggggtgagagatatgaggcaggaacctggtctggagcaataatggccttttttgcattggctcctctggctgtgtgcagatgctcccacttgtacaccaaaacctgcctctctgagcactttcacatgcatccatgaggcctgggtggttgttttgggtgtgtatttgggggggtggttacggtggcagcccagtgcccagtgatggatgaggggggtggaggtgactttcccaggggaagattagcgcctggcagctatgatttgtctcgtgccctcctgtccttttgctgggccccactgcagggtcattcattacagaggctgctgtcacagactgggggcaggggctgagcaatgtgtgcatgtgtgggggtggcaggcaagaccccttccttaggagagactctcatgccagagaccagagaccactctgactatgcagcagctctctggagttctgagagaagaggaccaagttgtaattcaccttctaagacataccactgactcaggagcaacactgtgtgatagggtggggaagggcatgtagttattcattcacttggcaaaacattcttctgagtgcccaccagatctgttctgtcccttccaggaactcacgattgctgaaggaagatgggcatgtacacagacagtgtcaggagggaacaggggctggtgtgacaggtgccctccagcctggggcacttgaaggcaagtgagaagccataggggatggtggaaagagcactgaacttggaggctgaaaacttaggcttgggtcctggctgcattacttactagcgttgtggctttgggccagtcacttaaaacttgctgatgcctcggtgcccacatctatgaaatggggctgtgttaaaagtgaaaaagatgtcaacgtgcttatttatttatttatttatttatttatttatttatttttgagacagagtcttgctctgtcacccaggctggaatgcagtggcgcgatcttggctcactgcaacctctgactctctggttcaggtgattctcttgcctcagcctcccaagtagctgggattacaggcacgtgccaccacacccagataatttttgtatcttttttttttagtggagacagggtttcaccatgttggtgcggatggtcttgatctcctgacctcgtgatcctcccgcctcagcctcccaaagtgctgggattacaggtgtgagccaccgcacccggcacaatgtgattttttaaactggaaggtactatataggtgggtgggatcactgctttgtcagtcctgttgcagggatgggatgggggcagggcagccagatgagattctagaaaaaaaatagaaccccttcctcccaatccccacatatttatacagtcctctgcagtttacaatgcactttcacactctgtatttcttgttccttacaacaactttgcaagccaggtcaaggcaggcattattaaatcccatgttttaggggaagaagaagctcaaagaggataaatgacttgccgagggttagtgagcccagttagtgggtgagctaaggctggaatttggttctttctgatacccaggcctgatgctgtttccctgcttctacacaccagagcccctctgtccctgctctggtctggatgacattgctcccacccccctggggctcccatcccataatggatgcagtaccttccccagtccacgtaccttcattatgacaactcatgaccacttttggttacaataatgtccgaaagtagccatgagaacagagagagcactgtaggtttaagagtgttcaatggaaagaggagaccaagctgagatttcccaagggctctcacccaaaattggtaggccagctgataaattagtatgataaggagagaaggagaaaactgaagagaggggaaggaaagagaagaaaaggcaataaagaaagagataaaaagaaagaaaggaagaaagaaagaaaagaaggaaagaaagaggaaagaaggaagggaaagaaagaaaaggagaaagaaatggaagttgggtgaagagcatgatgagggagtaagggaaaggcgaaaataaaaaagagtgggagtaagacagaaaggaatccaggagagataaggaaagagagaaaaggggaaggagggaggccaaagaggctggggagggtgctggggggagggccagctccactctggcaaggggtgcgagattgaaggctgaatcgcagcaggcagtgaaggagaggaataagtcataaacgctgcaggggcaaaggtcaaatatagactgatggctccattgtttcccagccggtgaggaggaccctgttgggggctgctgagatgcttaacccttccctgcccagccctttgatggtgaggcaggtgtgggaatgcacagtgagaaaagcacctgtgtgtccagggtgaggattagggggttagagttgggattggatgggggacagggtggggactgggtcatggaagaagggactgaaaagtcctctccacttcaactcacaggaggtagaataaaatgaaaacatgccacctctctttttctaatagtggtagtcctcttttgcatctctgtagagatttcctagggaagaaggaagttcttgggaaatgattgagtaacacctatcaacaacaataataaatagtattaacaatataaataaatgtttactaaagaataaaatgaaattcatattaatttttattaaccattaatatatgctattattgtgcagtgcttatgggtttgaaaataactttgacaaacatgttattaaatctaacaatcctgtgtgataggtattatcagcaccattttatcagtgaagaaattgatgctcagacttgtccaaattgtgccagttagcagctttctgaatcctaatccacagatctttgcactacccagaattttccttgggcagtatcatactcaccatagaggaaaaacagagactttcaggaagggtttggttatgaaatgacgcttgccggtcgagaaagccagatgtagttggttagagaggggatgagaggatgatgtccgtctgtgggataggtcttcagaaccacggacagttctcagaccaccgtttccacatcccctcttcgccagactatgaagccttgggtgggtggggaggtggtgcgggggaaatatcaccagactccttgagccctcccgaggggagagctggggggctggaggatgggatgtctactcctcgtgggctgtaactccaccccccaccccatgatgtatagactgacaaaggacttaatgctgtgaatacataaagcggcggaggcctgggcagtggagggtgacagctgccctttaatgcttggctttttaaagatcatggtagagttcagaaagtatagtcatgaggtttaatgatttaatggggacgactggggagcaaaaatagttactgcgccctggggaaaagtgactcctcatacatattactttagcctaatggcctataacgccctccccccgtgcccatggggggagtcacgctacatagccgctgtaataccgaatggcctgattaaatgcatattaaacaatactaaattgggaaaaaaaaggcggaggctgctaaatgtatttattctgtgaggggaagatatgactcctcctctagcattggatggaagaagtcctcctgcctagctggttccccaaaagatgtggtgtcccagtgagattcagagggaggtaggaacctcatttctttgggaagaacttatgggggaaggcacctccaaaattgaagggaaatgctatacaaccaaggatctggaatgccaggagtaagaagggtccacaagatctactgtcccaagaggccgcagggattctcagcttcgagttctgtccacagatatgtggtttgagtctaatcagtcatttttgagaggctgcttttccgtaaaatcaggggctacttttggattcttgggtccagtgtactgttctccttagctgtaaaccactcccctccctcaacatggtcctggtcatcagtttctaagatcactgatgaggctagagtgagaatgaagccttagttcctcaatgcacctggattctatagaccatgaatacatgctagaatcaccttggtaggtttttaaactaccagtgtctggattattctccccaagagattctgattcacttggcttggtgtgcctcccaggtgttggtattttttaaaagctacccaggcgagtccaatgtgcatccaaagttgagaatcgctttagtagagtgtcagagctgggagagacttcggaaagcacccagtttaagatctttatttcagagatgaggctgggagagactctggaaagcatccagtttaaggtctttatttcagagatgaggagttgaggctcagagaggccattgacttctccaagatccatagagatggactggactcttgactctcagccctgtttcctttccattgcactccttccttttttatggtagaatggacaaggtcagatcagaaccagtgactatgaaacatcagaatcctggctctgcagctccctgtctcagacccaggcagacccaagatagcatttttttcccctgaacttaggtaagagggattctttggtcactcagctctgtctgagatgtcaacatgtggttttctgaccccaagaaccttccagaccacctctctggcccctaatcccctaggccttggctgacctatggtctcacatagtgaaactttttaagagcatgggctctggagccaagctacgtggatttaaagcttagacctgccacttattaccagtataactttggggaagttagttaacacctatgcgcttcagttttcctatttgtaaaagggagataataacagcactcacctcataagactgatgtgaggatgaaatgagttaatacatgtaaaagtacatagaacagtgtctaacatgtagtaattgccatgtaagtgataactattgttgatttaacgttttaaacgtgcctccctatcgaagattgaaatgcattaagtttttcatatatttatatttgccttccacctccaaaacccttaaggatagattctagggcccacacttcagagattttggctctctcagatcctgaatggcttcaggttctagtcaggatccaggtaagttcttcagacattgccttccacaaagtggaggagaaaaacccttccaaagcttggatagggagagagtaaggaggacaggaacacggctatgtagaagctcagctccaggcagagtgctaagatgaaggttctacctgtcctctgggcatgtttgaaatgcttaaagatacctaagtgggtggtaatggctgctagacccaaaaaagcccactggcaagtgaaattaaacagaaaggagtcctgcttctggtttccttgtgggaatagtggtggcccatgagtgtccattcacctttttacatactccacagcctgatttcattgagacacaatctgatttccaaactgagcttcctgtttgcttagccactgactgggatgcagtgggacaggcccccaaaccatccaaggcatgggccgcagtccacagtactcttccctgtttctggcaagcacctgtccatatgtcatgaggagaatgagacaggagtatggacttcaaggaggcaccatcttctcacactagtttctgaatttttagatgcttttagtatagaacttttagtataggactgtgcaagagtagccttcctaacatcattgccaatgactacccttcccaagccttctatcctggaacacagccctaccgtccccaattcatgttgctccttttgacactcctgtcttggctcatcctgctttcttcatccgaattgcctttctccattattccatgtccaacttctgcccatccttcaaaacccaggttaaaagccatcatctctagcaagtgtcctctgattcacccaatggaatggtctctctctgtcttgagcactttacagttttcatatttccctccctcattgacctgatcacaaacagccttgcaccaccattacctggactccccatggctcaaccactagactctaagcttcggaagggtatgggcccttgtgtaaccaatctgcatgtgccccacactctacagtctaacaccaggcttgtgcagagttggcgtgtattgttgaacagatggtagagggttgagtgaatgagtgagtatcctcacctaccctgaagatcaaacctcattaagtaagaaggttaagagttagtcttctctagacctagtcagaaagacttaaaaggggtagaagacatccccctagaggagtcagtggcagaacctctcagctccaaccccagaccatctgcttggaggagcagggagagaaggagaactgtgattgattcctcctttctgttccaccagatacccctctacacactcacacacagcgtcacacacacagacctcactgcctactctcctcccttcctcctccttcaactgcatttaatataaatgcccattaaaaaaaattctcccctccctgtgactgcatgggccagaccctcccacccccaggtccctgacgctcttagattttcctgctgccacgttccaccctgagccatgtcttctagtattttgctttcaaattgtgtctcctgccatttgtgccacatttaaaatgctaacagtacagaatgtcatttacagaaccggggcgtttgctccggaaaattaatttgacttattccttctgcctgttcctatctccaggccaatattatgctactcattctacaagagtaatacttaatgaataggactattaataatgtcaaggtccgcaggggcctggcggctaacggataggcgtagacggaaggaacccatcacctgactcctggtttaatgtcccatgaaaatatcaggcactgcagtgtaattatggagcagggagaagcgagtggatgacgacccagagtttcttaaatatttttcaaattagttgatgcttttccttttgggggaggaggatgtttatccccccactctcactccattttagttctggtctggaagaggaggtggacctattttcattaaacacactcatgcatgcacgcgcatgcacacacacacacacacacacagtgagagagagagagagaacaatatataactcagagatggtaatagctactctcaccccaacatgttgagatactgtgttgggtatgagaagggggaagtagacagcataggtttacatttagcaaaagagaaaaacacaaagaaggaaaagaaaaagtggaatttaaaaatctgatttacagagtatcccagtaatcctcctttcttccatgcacttcttcctttcccagtgcacatagaattaccaaggtaacagggcttctggagaaaacaagaggtccttcattatctgcagccccagccctcatcatccccttcccacagtcctgaatacccaaggagaggaagagtggcccttgctgtacagcttcttcattgcttgaagcgtgattcctttcaagccctgagattatggccctgggttggcccacatggctgcttttataggaatggagcagcagggttgggcaggaaccatgggagagggaagaggggagggatgggggaggccaggactgggggcaaaggagttggagtgggagtcctgtatgtcagtctcatctcatgtgcagaaagtggataaggatatctgccttgcagaatggtggtaaagccatgagataatgggtgtgaagggctggggctggggctggcacacagaggggctgataatattagtcccttttgtccagttcacagatggtgcaatcaggctccaccatagcaggaaccaggcatctctttctggtgcagagttgaacaaaggatacttgcctctcgccctgggtgatgtgtgggagcttccagtgtagtgggggaacctctgctcttgaggggccctcagactcccatgaaggagtcatgttcctacctgaggttcccagtcttatggaagagactcagtttctgatctgagaggggcttctggtctggtgctggaacccctgtccttggagggttcccattcttatggagtaaccacagtgccttccaccagggaggtctgcagtcttatgagagttccaaccccctggtctgagaagcattttagttttatgggagaaatccagcttccaatcagggtgggggccttctgatctggttggggaaactgggcccttaccctgcagaaactccagtctgatagaggagacacagcctctgtgttctggaaggcctcccagttcgatggtagagaaaaattcttgctctgtgggagcctaaatatggagagggatgtataacacttggcatagtaaaatcccagtctaatgggggagacagagtctgtctttcaagagatttcagtctgttgagagaacagggtggcctaaagaaggcccatctgatggaagaaaacagagcctgcccgtcagggagctcccagaccactggggaagagagaccccttggcctcaggggatgccagtgtgatcggggagggcttctttgcagtggcagataccctggtcttatggtcttattgggaagacatggtacccaaggtggggcagcttccaccctttacagggatggcagggcgagtaaaggcaagcagactgcagaaaccccgaaagaggggaggcacaaaccgttcagctcagctgggtagaaatcggctcaagcccatcagagtgacagatacccggggaggctgggcgtgccaagctggaccggtccggccaggctggaagcccagctgcctgctttttctcagtgcctggagaccacccgccttttcagcaccacggtcagcggccttttcgcaggcgcgcgccccagccccgccccgggttgggctggcatccagcctccgggcccttctgcgtgtccctcggcccaccggcatcccgggctggaggtgtgggtggggcaggcgaccggggtatgagaggcggtggggtgcctcctccgcgcgtctctgcgagtatctgtctcccccatgcgtccgctgctcctcatagaggcgtcgggagagtgtgttcgcgactttctcgcacagcggctgcgcccgcgcctgaccctgccaagagaggggacacttcctccacctcatcccctactccagggtcaggaagggggtcaaggcttcctcttggggtcaggtcagcgagagcaggtcagatgtctctgaaggcatggggaggggggggtgtgtgtgcctgtgcacgcgccgcgggtgcgtttggggatgtcgcagggaagagatcatcttactaccatgtcttcttggggcactgcagtacagaatgatcaggagaggaaatcttccttctggctctggataccctgctcaccgcctgggtgagtcaggcctgggtctgtagctgatcttgcgttcccttccccaatcctgaactgtttgtgtgacagtctgtgcagggacatctggcttctgcagggaaccctgaggggcccatcccatgccagctgaggtggggagatcagcggccctacagacattctgcccagcccttcctcctttctctccatcacctggtttgggcctcttaacacctgaaccctaacagatccaggtggtccaaccagaccctgctcattccactctttgtacccccatctcccagaagcaaggtagaggggtggaatggcctagacacagagagacatcccatctctacccccacctccatcctcataaaaggcaaatatggaatcagcaaaaagaaaaaaaggccaaataaaaagtcataaagtcatccaattaataattattctgagggactcatcagaattcacagctgggccaagaaaatggtggaaggagggggtcagagaggacaaacgtgggggacgccttcttttccctcaccctcaggtgagagtgaaggcgcctcctgccaagttctcgttttctcattcgcttcttttttttttttttatggggcatcctgagtgtaaaaaatatgacttgcctttatggtgctccaacaggaatgaagctataaaattatgaacagtttttatggcggctattcgggggatgcttttatattgatggtatacagcctgaatctgtcttttttgcatcccaccccccttccctgggcagggaggggaagtctgtgtaactatttttcatgcatttaatatattaattatctggtaaatgctccccaggctgtgctcgggacattggagagtgacaggttctcagcgagcctccgaaggcagcgcatcagcctgcagtgtattatgtcggcgaggtcagggtggggttaatgtaactttttatttgctgatttttcataggcgggagcaaagccgggatggagggagggagagagaaggagggagagagataggagtggggggaggagaaggtgccacaagagcagagataatggtgaggcagatctctccacccccaattcacctctgtcaatgccaggaggtttgattaagtaggaaaggagcagtggcctctcctactggctctggcacccaaagccacacactcctggtgacactcttgggcatgagactttcccttgctgcatattgcgcccttgaatgcaggcacagtgtcaccttccaactccttctcacttgctgaaactgaaaccccggctctcgggtctggaagaaaaactataagattaccgcgggagtgtctgaccagcttccctttgtatactcccagataggtgcttacacacagccacgtggacttgtgcacacacaagctggctttgtcactcgagttcacattgtccctcctgcacgacatgtcagattctggttcctcgcccattcacaaagcgcagcttctggcgattaaacaagggaagcgatgaacaggtctcactggccacagtttctcttctctgtcaatgataccaagagcactcatgcctagagccgagaccctgtccaccttgcaagaaaggaaatctgtcagccaacccatctctgtctggaaagcctggggagggggctgttcagaggtcctgatgcccaggtcaccactgggcctacgtgtgtgctccaagtcttgagagaataaaggctacttcttagatcagactgggacctctctgttcctggcctcttgcccccgccctgccatctgccggccccaagagggcagcacaggtgggtcttttctgctttgactggttagtgatcgtgaatacttgagtcctggctccctaacgctttgaagcctttattttggtttttgtatagagttttttttctttactgtaaaaatgtttaatcattcagaaaagtagagatattgttagcattattattttaggattggggtagacacttttgtgtgtttagccaggaaaatggcagctcctgctgaaccaggagcacagacccctgggttcagggcctcagctctgcctagacgtactgtgtgatgcctctttgttcttcaccaaagaagacaaagtaggggcaggatactcctgaggtgctgcagacccacctacctttgctcactgaggactcaggagtgtgcgcccacgtgcacatgtcctatccccctccaacgagagaagttaggagcttgagttctagaaacagggtctttgctttgccacttcctgctctgtgaccttgagagagttcctttcctgcgttcagattcagtttccccatctgtaaattggggcttattatattagggctgcaaccttataggaatgttgtaaagaataaagaagtggagccgtgtaagatgcttagctcagtgcctggtacaaacactattgctgttgctattgtgattattactattattattttgattctacccaggcctacccgcccttttttttttttttttttgacttggagtcttgctctgtcacccaggctggagtgcaatggcgtgatctcagctcactgcaacctccgccttccaggtccaagcaattctcccacctcagcctcccaagtagctgggattacaggcacccgccaccacgcctggctaatttttgtatttttagtggggacagggtttcaccatgttggctaggccagtcccaaactcttgacctcaggtgatccacctgcctcggcttcccaaagtgctgggattacgggcgtgagccaccacacccggccaccagcccatgcagcccaacccctgtggagttaccactcttctacaaatttgcaaagtctgcattccaagtggctatttcctcttaggcgtttggcctgagttgtggcataccatgcgataggtgtgcagtgatgtgtaattgtggtccaaacagcagagcttagtaggcaaatgccattgccatctctattaagtcagcaagggggtatcattaaggatgcaacattgttgggcacctatagagggctggaggtgtcaggtacattacctcatttgtctttcttaatggccttatgaggtagataatattattaaaccatctcactggtgaggatcttgaggatcagggagattcagtcaatgatatgccagcctgaggtcaccaggtggtaagaaccagggctgggatttaaggccactgactgcacagctcatgggcttcctgtttcttcaggctgcctctggctccattttttaaatgataccaactaaagcagtgagagcaaccttgtgaaaatctaagtgcctactatctgtcagacactggtgaggggctcatgggggctcacaacaatgaggtgtttttgctggtctggaggagtctggaggccacttggaggagataagacatttagtaatagtagtagtagtagcgccactactcataatataaataacatcagccacaatagttaatgcttactctgtgtcaggcacttttccaagaacattattccacaaccccataagacaggtattgttattacccactggtctgtaaatgaaattctgaggtccagagaatttaaggtgcgcagaacttgcacaacttgctagtggaagattctgtgtcgggaccaagactgactccagaggtgacaccctcaaacttgtcatctgctgtgtgccagttacccacttttcacaattctttttcaagtttgggattctcatgctcacttaggtgtatataaatgtgttggcccttttgtaatttttatttttgcagaagtatttaatgagagcattttaagtgctgtgttactaaccataatgacaataactactaaatgtcttggtagtgaggtttgagggcctactatgtgccaggcattgtgttaaatgctttgtttgcattacctcatctttttttttttttctatcgcctaggctgaaatgcagtggcacaatctcagctcactgcaacctctgccctccgggctccagtgactctcttgcctcagcctccctagtagctgggattacaggtgtgcatcaccacgctcagctaattttcatatttttagtagagacggggtttcactatgttggccaggctggtcttgaactcctgacctcaagtgatcctcctgccttggcctcccaaagtgccaggattacacgtgtgagccactgcacacagcctctcatctcattttctcaatgtccttttgaggcgggtaatattattgtcacctctgttttccagatgaggaaactgagattttcagttgcgaagtcacgtaataaatggtgaggccaggaaaatggtttaagtccaggcaatccgtctccaggtttagagctcttaacccaaagctcttcatgagagagaagcttatggaatccaagggagaatttccctatactgcaccccagtcacactctcctcctccccctcaaagagctttgaggtagaattttccgagaacctttatatatgtatgacaatgtatagagagatttttcctcataaatgtgatcattctgttgtattgttctgcagatttccctcctttcatattgatatatgtagacctagttcattcttttaacttctacctaatattccagagaatgggcttaccataattcacccattgacggacatgtggattatttctgattttttgatattgaatgcaatgagcaatgcttccttgggtattctaataccggcttttcaggcacatgtgctcagcagctagaagtggaattactgaatggaacagaatgtgcctttaatatttttctagttgttgccaaactgtccttcaaaaaggctgcatgctccccccaaggcatatgggaggacccccatttcctgatctgtttaccattaatggctattatgcatatttttttccatttttgctaaactcatatatgaaaaaaaagtcttcattgttttaatttccctggttactactgagactggggacctttatatttatttgcctttttttctgtcttctttactctttttataacccattgatgcatatgctttgcccatttcttgattgggttgagggtttaaggttcttataatattaatttcctgatgattaaagtaatacatgttaaacgaagaacatcagaagacacaaaaaataataaagaaaatggatatcacacataatctcaccatccagaaataacacttggcatcatattggtgcatttttgccactctttttctctgtgcaaatatatgtactttctttctttctttctttttaaacggacttttgctcttgttgcccaggctggagtgcaatggtgcaatctcggctcactgcaacctccgcctcctgggttcaagcaattctcctgcctcagcctcccgagtagctgggattacaggcatgcgccaccacacctggctaattttgtatttttattagagacggggtttctccatgttggtcaggctagtctcgaactcctgccctcgggtgatccacctgccttggcctcccaaagtgctgggattacaggtgtgagccaccatgcccggcccaacatatgtactttctacctccattcctagcatagcctggtatatatggccttggaccattttctccacttgtcactataaaggggacattttcctatgttattaaatattttaaatgctatttttatatttgcttagtattgatccaattgatgtgttaatatttaatcattattctaattgctagacatatataggctgtttccagttttccactattatataataaataatgctacagtgaacatctttgtacataaatctctgtccacatctctgattatttccttaggatagatttcttcaagtggaattactagatcaaagggtatacatttttaaagattttgatccatattgccaaattgctttctagtagggatacattgatttccatccccattcaccatgtatgggacatatatttaactgcacactttacaatttaaaaaaaaaaaaacacttttcaattggaaggtaaatgtatctctttattgtcttaatcttcattgtcccttgcagggaacttaaacatattttccacttctcttggccatttgtattctacgaattgtctctccatgttttctgcccactttctactggacttatcctcatgttttagacaaaaaacctgaggttcagagtagctgagtaacctacccagttacatagttggcaacagctacagccagaatccaaacctctcttactccaaatcctgagctcttgccctgtgctgcttctctatgactctagagcaagaatcagcaaactacgactcagcctgctgactgtttcgtaaataaaatgtattggatcctggccacgcccatttgtttactatcatcgatggctgttcttgcaccatggcagaggtgagcagttgcgacagagacagtatggccaataaagcctaaaatatttacaattggttttacagaaatttttttttttaagacacagtctgactgtgtcacccagactggagtgcagaggcgtgatctcagctcactgcaacctctgcctcccaggctcaagcgatcctcccgcctcagcctctcaagtagctgggaccacagacatgtaccaccatgcttggctaattttttgtattttttatagagacagggtttcactatgttgcctaggttggtctcaaactcatgagctcaaacaatctgcctgccttggcctcccaaagtggtgggattacaggcgtgagccactgtgcccagccccagttttacagaaatgttttatggaaaacatttgccgacctatgcacccactgctctggagtagcactagtatatcatttcaaatgtcctagtagccctcttttaaaaagtaaaaagaaacaagtgaaattaattgtaagaatgtattttattttcttaataatatcaagatgttaatatataagcacataattcgtataaagattattaatgagatttttgcattttggggagggatattatctttgaaatctgttttatattttgcacttagagcacgtctcaatttggactagtcaagttcaagtgttcaactgctacatatgcctagcggattaccttaagaaacaatacagctcaagagccccaagtttttcacctgtgaaatggggatggtgctaatatcactcactttgcaggattgttgcaagacttgaatgggaagctgtgtgtgtatacagtttgtaaagcactgcatacccgcaatggcgatgattataactatgggctgggggatctagggtgacttgcctttcactctcaagatgagtagaaatttgataggcagagtgtagttattgctgagaataactccaatggttacacacatatatactcataccatgtttttgtttgttctcttcactggatcagtgtcttctgaatagtattcagggttagagagggcgggagtaagtcttgctcactcagtgcagaagagattgttccattaattcctcaaatgccccatttcctgtgggctgtgcctacggccactggaggtgtctgtctctgaactgccctgcttggctgccaagcagaattaaaatttgtctttttaatttaccactttattcatctatcaaatacttactgaatacctattgttcaacagcctctgagatgagagttcttttcctaaaggatttcctcaaaacatataactacaacaaagctactgaaattaaaatgaaaaacaatgagaaagaggtaaacatgtttaggcatagaacctgtgtaacatgaatttaggctctgagcttcttggcaaccagggcaaaaagggaaatatattagattacataatttccactatctgggagaaaaatgtgtgctacttttttttttttctaaaagagacaaactgttccttggtactacattcaagcaggtcatcatcacacaaggcagtcacacagggactctgagcagcataatagacaaagcctccaactgcagatttacagcaagtgcagccgtggtcttcctgtgcttgtttcttgtgtctgccctcaataaaagctgagggcaccatggtaaagctcaaacgcaatggaggcaatactacaggaatccaacctatgtaatccaggtatgtggctttctagggatttagcttgaagcaaggaaggggtttcgaatgcccatgggaaggtctgccccagctgtctctgaaatccagtccatcctcttctttgccactgccaccacctagggtgagtccttgtcctttcttgccacctctctggtctctctcctggactctcttccattgagagccagtgatctctctgctacacagacctgatcatcaccccaacactccaccagctcaaaatccatcagtgatctaagtggtgggatttggggtgaatttgtttgcactcagcttggaatttttaatcattgtttgaattctttataataagtatggatcatacttgcaaaaacagtaggatgattttattttagaaaaaaaaatctgggttgagatgcccagctgtgccaagatgctaatagtggttaattctaggtggtgggactatgggtggttgttactttttactctatattgaagtatatgtttaaagtttacaaaatcatttagtccttcttttttgcttgtttgtaacctgaaacccactcactcctcctctgagctctccttttgcatagtgacatcatttattaggcacctactgtgtacaagtcactcttaaaaaatagtactggatttaagccatatgttgaacccatttcatggatgaaggaactaaagtttcagagtttatggaggaatttgcctggggtcacagggctggagcgacagagatgtgattaggaccagcagtctgcagccaaacttccagttttcctttacactccagtctcctactcagcacattgttttttgtttttttttttaatttttaatttttattaaaaaagatttttttttgagacagggtctttctctgtcacctaggctgcagtagcttactgcagcctcgacctcctgggctcaagtgatcctcctgcctcagcctcccgagtagccgggatgacaggcacgctctaccatgctcggctaatttttgaattttttgtagagatgaggtctcgctatgacccaggttggtctcaaactcctgggctcaagtgatcctcaatcttatcctcccaaaatgctgggattatagacatgagccatggtgcctggcctcattggctcttttatttcttttttttaatacttcttttttttacttttttttttttccgagacaggctcttgctcgatcacccaggcttgagtgcagtggcgtgatcacggctcactgcagccttgacctcccgggctcaagtaatcctcctgcctcagcctcccaagtagctgggattacaggcatgtatcaccacacccagctaatttttttaaattctttttttttgtagagactaggacttgctatgttgctcaggctcatctcaaactcctagactcaagtggttctcctgccttggtctcccaaagtgctgggaatgggcgtgagccaccgtgctggcctcttttattttatctttcttttcttttctttttcttttttttttttttttttttgaggcagagtctcactctgtcacccaggctggagtacagtggcaggatcatagctcactgcagccttgacctcccaaggtcaagcaagccttctcacctcagcctcccaagtagctgggaccacaggcatgtgccattgcccccagctaatttttctgtctttgttttttgtttttgtagaggtggggtctccctatgttgcccaggctgttctcgaactcctgagttcaagccatccacctgcctcagcctcccaaagtgctgagattacaagcatgagccaccatgcccggccctcttttatttattcacaccagcatagtacttggcttattctagatgttcaataaatgtttattattacacacaggtgcttcctaaatctcacttctatggtgggaaatttttgaaatactgacttttttcttccttcgtaacatcccttccttttacccctcggtatcgttgcctcaaaggacctcagaggatgaggcctgtgcccaggcagacccctgagagccaagagggtgtggctgagaggtggcatctagatagcttcatggagaatccagtgcctcagcaggaggagcagaccccctaacgtgccttccatcatgacctggaaggacacagaactgaaagtgccacttggacaagaaagaagatcctcttagaaggcacctgggtgaacagatcacatggacgatcacgtgatactctccccacccagcctccagcactacagaagccctcccagacttagacggaagtctagggaaaggacgagaactccgaggaaattcaaaaatcactgagactgaattttttttccactgccagtggcacaaggactcagcatggaaattaaattgcattaaagaaaaaatgttttatcataagagtctccggactgagacttttactacactgcccctatctgggcatttgctcggctggagaaacacatttcagggtggcactggcctctgagcatgcggaaggaagtgtggaattctaagccacctactgagggcagggaggtactgggagttcggaacccagaaaagcagacaaacatcctgaggccaaagttacggagactgataggtgttctccccaccgggaaggtctccccttctgtgtgtggaggtggcaaggagggccctcttgttggcaaacttagagcttcctcccaaggtattttggacccattacgctctcaaacaggaacctaattaaatatatatatttatatatatatttataaatatatatatttatatatatttataaatatatatatttatatatatatttatatatatttataaatatatatatttatatatatttataaatatatatattaatatatatatttataaatatatataaatatacatatacatatatatttttttaagggatggggtctctctatgttgcccaggctagtctcaaactcctgggctcaagctgtcctcctgccacaaccacccaaagtgctgagattacaggcgtgaaccactgcacttggcccaggaacctaatttagacccagaattccacaccattgaccatggaaagaatgatcttggcctgagaaacttttagagcagatatgacgagttgcctatgtctgcatcgttagtgccctggtggactctctccttctaagcagcacagctccctgggggaccttcaaaaagagtgagccatgaaatggccccccaggggataaaaaagaagggagtctgctgaatgaagttacttaccagtgaccctgccaatttgagcctccgcccggcaaggacagtgaatttggctttgccatggttgatgctgtcagagagagcttgggcggtgggatagggaggggccgcgttagtggaccagctgggtggctgagatgtggtgggaacatcactgtgctctagttgcaaagtctggtgccagttttcactctgctcttaccagcctggcctgagaaacccactgcctctttctgagccttggtgccctccgttagacataactgcctcacatggttgtggggagggcgcttggtaagctcttggtgacttcccctaagaatctgtcatcctatttcactagcagcagcctcatccagtcttagctgcaaccccgtgtcacccgtggaaatcccgttatcccatgaaaatgctgtgattcaatgcaattaggataaagagggacctgggggctaccaccagtggttacactgcagctggaaagcaagtggcctctttactaccagtaagcgcggggtgtccttcagccgagccagtcaggacgctggtactgggcctcctggatgaccctacgccttctttaaagccagatagcccatattcccggcaaacactttcattatgctcttcttttggggcgtggtgaggttagtgttaattgcggggctgttcataataaatcagctctgagcctggaatttttgtttttgtttttgttttgtttattttattttattttgttttattttatatttttgagacagagtctccctctcttgcccaggctggagtgcagtgacacgatctcggctcactacaacttccacctcccaggttcaaacaattctcctgcctcagcctgccaagtagctgggattacaggtgcccgccaccatgcccagataaattttttttgtatttttagtagagaccatttagtgaaaccacttaggtttcaccattttggccaggctggtctcgaactcctgacctcaagtgatccacccacctcggcctcccaaagtgctggaattacagacgtgagccaaggtacccggccagtttattattatttcagagacagggtctcactctgccacccaagctgacctgcaatgctaccatcatagctcactgcagtctcaacttcctggttccacctcagcctcccaagtagctgggactacaggcatatgccaccacgcctggctaatttttgtgggtttttttgtttgttttttgtagagatgggttcttggtatgttgcccaagctgatctcagactcctgggctcagccaatcctcccaccttggccccccaaagtgctgggattacaggcatgagccaccacagccagccatttttgttttagttggaatatgcacagcaagaaagccactggggcatcagcctttcctgtacattacctcattccatccttactacgctctgctgaggcaaggtaggcaagcattgttttaccttttcaaatctattttgtatctctccatcacctctgccatcttcctagtccaagccactgtcaattttttttattaaggttttctaaggtatagtttatatttagtgaagtgcacaaatcctaagcatacagctggatgaagttttacacccaggtaaccactgctgagatcaagctatacattcccagctttatagcaggcttcctctacctccctacagccattatccctcccaaggataacagctatcctgactgctattcttacagattccttctgcctgtttttgaacttcatataaatagcaccatgcagcgtgtcctcccttgtgttgtgagattcacccatgtagcatgcatcaatcgagtcgtttgttctttttaactgctgcataatgttccattatgtgaatagaccataatttatttgttcattctataactggtggacatttgagttgtttccagctttcagctattacaaataaagcttgtgtcttttagcggacattatgctaggtcatagagtacatttatttttagctttaaaaggtactaccaaatatttttttccaaagtagttacattgatttacattcccccctgcagtgtatgtgagtttcgggtgcttcacaacctcatcaacccttcttggtagtctcggtcagtcttgtaaaatttaaccactctgatgggtctgtagtagaatctcatggaggttgtaccttgcgtttctctgatgataaatgatgttgagcatcctttcatttgtttattgcaagccactgttatgctctcatgggtcactgtgcagaactcctacccaacctcgctcttcctgctctgggcctctccaatcccttctgtccagtacagctgcagcaaagagtattcctaacatagcattttggtcctgttgctctcctgcttaaaacccttctatagctttcccttgccctttggatcaagggccaaatccttgacctgttcctgctttcccaggactcctgcctgcctctccagcttcatctaagatcattctgtcccttgtacttcagccactctggtctcttttgggcatgtgagttgtttccaggttttagctattacaaaagctcgtgtcttctccttcccagcatttatcttatattctgtaattatatgctgattgtttgattgatgtctgtctctgctactagacggtaagatccataggagcaaaccctacacttgtcttgctcattttgcatctctagtgcctaatgtagtgcctgacacatagtagatccacagtgcatatttgttgaataagtaaatacactgatatggtgtgtccccacccaaatctcatgtcaagttgtaatctccacatgttgaaggaggggcctggtgggaggtgattggatcatgagggcggtttctagtggtttagcaccattagtgctgtctcgtggtagagttctcatgagacctggttgtttagaagtgtgtagcacttccaggccgggtgcggtggctcacgcctgtaatcccagcactttgggaggccaaggcgggtggatcacgaggtcagcagttcgagaccagcctgaccaacgtggtgaaaccctgtctctactaaaaatacaaaaattagcctggcgtggtggcatgcacctgtaatcccagctactcaggaggctaaggcaggagaatcgcttgaaaccgggaggcagaggttgcagtgagctgagattgcatcattgcacttcagcctgggcgacagagcgagactccgtctaaaaaaaaaaaaagtgtgtaacacttcctcctttgctctctttcttctgctctgccatttgcctgcttccatttcaccttcctccatgaatgtaagtttcctgaggcctcccagttatgcttcatgtatagcctacagaactgtgagtcaattaaacctctctataaattacccagtctcaggtagttctttatagcagtgtgagaacagactaacatgtacacctccagtttacaaattaagaaactgaggctctgagagggaaggtgccctcaggttgcagacctggagctagaagccacatttcctgattcttcaatgctcttttcaccgtaccccaatgcctctgatgagatgatgagtgaaaacattttgctgttgcttttacacaattctagtgtaaggattgctgtgttatgactatcgtcgttgttattattatcggatggacatcagaatgtcagctccaggagagcagcaatggtgtttcattttccactggatcccagcacctcagtacagtgcttggaacagaggagacacattggtgggattgacagttaactattggttgaattgcagcattgttggcatagactagtataaagaaaaatgtcagctccttttaaaagcagatgctatggaactgttcatatgttttcattttgctgggactttatgggactgattattgtttaaattaagaagctggtgactggtacctggaaatctgtcacatgctaaatggtattcactgaaactcagtaatcccaaacttcctctggttgcactcaggcaggttgaccttcattttcccccttgggaaaaagttaccttgaatcatgaaggatggaaaaaagaggacactcaaaaggccacaaggaacctaccaaagagaattagggctttgctcattgttggcaagcaaattgctgctgctcattgcaaatgaatcttatttgtccaccatcaagtcttatctgctcatcgtggcgggtcctgctgctgcgctgcttggcagcagatgggttccagggatggcagctccatggaagtaataaaatggcatttcttttccaattgtctctcattgagacctcttggtaattcagattgattgtcttacagcccagcacagggactgactgagtgaagtttgtctgggcccgggcttttattgctgtctcaggaactgaatgatatacacagccagattattctccagctgcccaagggttctgtcctttccagtcaggggcaagccctgaaggtgggtgaggcgaggaggctccttcaagtctggaaccaggcttctggactcctggcccagtgctctgtttagagcagctgatacattaccaggaacaggcctatgatagtcttcatcacctgcctcagccaggaccacggtgcctcagcattcccagtggctttaggctttgtctgcagtgggaatgtcttgtccatcccctaagatccatccatctgggagtcccaagatgctcccagaggtgcagccccacacccttcctgtggctctgcctaagctcttggtgcctgagggaacggagagaatcaacagcttcttagttttgagctgtttatcagtttttttgttttttgtttttgagatggagtccttgctttgtcgtccaggctggagtgcagtggcacaatctcggctcactgcaacctctgcttcctgggttcaagtgattctcctgcctcagcgtcccgagtagctgggactacaggtgcatgccactacgcctggctaatttttgtgtttttagtagagacggggtttcaccatgttgggcaggctggtcttgagctcctgacctcaggtgatccaccagcctcagcctcccaaagtgttgggattacaggcgtgagccactgtgcccggcccgttttgtttttatgagcagggagagtcagaggttctggggtgctgagagtgaatctggggtctggcagggcactatacaccccctcaccccaacagctaaaccaacagctagaatctctgctctgaaggctcttgaaagtcctgtgttgaaagggccagacccccacccctgggagcaaggccaacctcgtgtccccttgtaccctctcctttctatttctgtaaatttttttagttctcctcctggccctgtctcctctttccctcatttctgtatccccatcccctcagacccatctacccctcaaccccatctgactgccgattgaaaaggcctgataataatgtgaaataatatagtatcacccagaggctgctgacaggcagtgtggccacctctgaaaacaggcagggaggcagggagggcaaggaaattataggctgcacaaaggagaaaaagttaaagtgagagctccataaaagaaagtggaactattatgctgcaaaatgccaactcattacaaagcggccaaataagagagaaatacggcgctgcctgtaatagcagtttacaagggaacattgtacagcaacagaagagacgctgctataatttgctctaacaactccaattatcccttttattgatttggcaacacatttaataggagtagccacacctcttctgttacaaatcattaaaggtgttgaacggtgtaattttaaaattgtcctcctacagttgtcagtatgacagcataattccccctgatttcggctatgtaaacaccgaggcacagtcatttcccccttacaaggccagagatgttgtcagcctggggtttttgtgcagaaacatccatttaatgcgtatctttttttccccagcccgcactcctaattgcagtgaggtttggtttactcttttttttttttcctttctctctcactccttccctcttttcttccaactaagaggtgtgtgtgatgggggaggtcagggacggaaataaacaggcggtttggtcttctctttcttccctggcagccttaattgctacttaagcgtgggccctgcacttaacatccggggggcaggcccggtgcgtggtgcacgccgggcgcgctgtgcacagtctccggaggccgccagtgcgaccccgccccacccgcgcacccccgcccggagggccccagcgcgcatgcgctcgccgcagggcggcctgcggggctgtggacgcgaggccagctcgtagggggctgggcggtcagcggggtcaagggacagccacgctgggacggaggacggggacaggggagcccctgcggcgccacttcttcctctccgagtcctgtctgcccttgatggagccactggtggggttacttgctggcggtcggccactttcgcccctccctcgccagcccgccagctccctaaggttttgtggttttttgtcaccaccacacctcagtgttgagctaagtgaggacgtccccccagcaaatgtattggacggaaggaaacgctgtgcgggaggaggcggaggaaagtaggccacccggggctcaagtggtgagaagaggcagccaggcagggtggaaggtggggtgtggccagcttgttgggtgtcccaccctgtgctgttgggggcgtggagggtagtgtggggtggccagggcgggctcacgtcctcatccccctcctctttcccagaaccacacccaaaccctcttcaaccccctgtgtgtgggctgtggcaggggtcaacctcttgtgttcaggtcccctaggggcccaccccactctactaggaaccaggggtcggatgctgtcaggggaagccgtgtggcttgaggagtcgagaccctttccaaatccacccctgtggaatcttgagcaaatccccacacccaacttagcttcagtgtggtggaggtgggcccagcgcctctcttgagggagtgctgctgtaggtaccttccagcaggccaggctcctgagctgggatcaccatgaagctggcatctctcctggtagcacctattctggggccttgagctccgacactcttacgctggagttgaacttaagctgcagcgggagggctttaagctagacccgcagaatttgagctctaaggacttgcttaagattgggagagtaacttcttctgcaagggggccagcagaggggctctcgggttgaaggagggttatgctggcccaagcattgccatcatagccacagctgggctgtgcctcagagtctgcaggagcagggcccttggccttggctcccaggacagttgggagatggagggcagccccagtagctgccatcttcctgtcatctacccacacgtctccagatctgtttgcctgcatcagggcctgactcctgccccacatgggcctgtgtaccattcaagaagaaagcttagctgtctccaaccccggcattcccacaagggaaagcttgagatctgctgagggagggtcctgggaagaggccttcttctgttctcctgtacagcagaggtgttggcatgtgcacgtgtgtgtctgcatgtgtgtgcatctgtgaacatctgtctgtggctctcgttctgagcacctgtgtgtctccgcttctgccttgttctgtcttggcacctctgggtgtctgtatgtctttttctaatcctggctctcttcttgtgcttctctgggcctcgtcttttcatctttgtgttttttgcttactgtattgtaatatccatttccatgctggaattctcctaccagaccatgggctctgtgagggcaaagactgtcttttatcttcccatgtgtgcacatagtaggagcctagtacatttctgtggagtaaatgaatggagatctggctctgttaagaatcccttagtgtctgtgtctctggctgcctgactttctgggtctctgtgaccctcagaagctagttttgtggttctgtgtaggggtatacctggtttattcccatgcatatgtgtatttcttgtggtagtttttctctccttgtctatgtctgtttcaggtttgttgatctgcctgaatgtctctgcatgtggccccacatctctcctcatgcctgctggtctcagagtataatggatgctgagtccaaagcaggtgtttcctgggcattcgtggcaggggaattggacttccaaatctgccccctctccacgtgggtgagcttctcccagactctccatcataagaggctgtgagcacccgaaactgatcaccttctcagcctagaatgggagtgagctgtggtcctctccctctcttcctctcactgtgaccccaatcacagcacctgcccttctctaattggctgatgtcaatggaagggggaagggaaggctgatgtccaaggaggaaatcccattaggtgagccagagccaagttattagtggttaagatgtaattggagttggtgaataatctcattcaattcatcacgtatttatggcgcatccagctgtgtgaccttgggtgcggtgtttcacctctctgatgaaataagaccttaatgtttgccaaggaccctggatttctgagattctgagtccctgaagctggaaggaatctctaccgaattccgatcacttgctgctgcctctctccttgcttctgagttatttgtgcaattacctgcattccctcctaaactctacattccttcaggccagggtcttatataactatcccccacagtttagtgccttgcacacagtgggtgatttatcagtttttctgaatggatgactgaatgctaggcactgtgattaataacaaagaaatagaattagaagccctgtgcttaggcagtatacaattttaggggaacggggagggcggagatgacctttgcactttatattatagctttgggaacttgtgtgagttcctcagcctctttgtgcctctatctcctcattaataacatgcaaataataacggctactaactaaggattttgtgaggattaaatgtgatcgtatgtacagttaaatccttcgtgtagtgtttggcacttagtagatccttaattaatgtgtgttcctgctctattcccaactagagaacaagcaccaagccctgtggatttcagaaggtgagaaatcactgatgggtggggtttttggattgaagctggggagtggggatctatagcgagatttctagactgctttattgtaccctatgcttcttttttttttttatctcccctcacttcctcccctcccaacacacatgaagacaaatagcaggtgctcagaaagtatttattgaattaatgcagaaaatgaagcccatttctttgtggctaaagatagcagatctcaaaccaggcttctcaatggaatcacctgggatctttttagaaatctactttcttgcccctcaaatccaaaattcagtctgtctcacacacacacatactgatcagaatctccaggcttgggctcagaactaatgttttttaaagctgcccaagtgactctgatatgtggacaatttgggatatcctggcttaggatatgatcaagatgataaatatttaatgtacatttgaaaataattgatatcagattgtaggatataaatgttaaacattcaattataatttaaatattgtttatacaagcctgtgttcatagccatgttccactcccatgtctgcttaaccacatgggggaatattggagttgagggtgaggaagggtgcgtgtctcagtggggcttgaaattgggactggaaggagagcttggcccagatcagagacatgaagcaaccaaaagggaaagagagaaggccgggcatgatctgcaaagctatagaaagagctggttactacatccacttcctttggccagaactccacctccacagagtcctcaaagatcttctcctgaactccgcactccccagccttgagaggagacacaggagctggaggaagcagctttatccctcactttgtggttcagtccagcctgttttccaaggggtaaagggcagtggaaggataactaagaaaataataataacaaatgaaagcatctctgtggagcttcgagatggttttgtggttttgacatccttggtttattgagtctgctatgcttgtcattacaaggaactacatcgtctctttagtgtgaccaacacatgctgggtccctgctatgtgccaatccaaccctgtaagatggaggtcatgactatttccattttacagatggggaactgtggctcagaacccagattccttgaccccaaggctcatgattttcccgcatgccttcctggggatggctccagccgatggagcctgggatgaagagaccgaccagctccctggaccacaccctgtccttctccttgtggtcccttagctctcctttcttgttgcttctgccctcatccttttcctgagtggtctctcctcaagtgtgtgtctggtgccccaggaagctcctctttcacccacccctccaccacctgccctgtttgatttgacttcattcattcgcttgtctattcatctaccttttttcacctagcaagcacttggcaggcttggccaggcattgtgctaggctcgggtgtccagaggtgaggaagacctttcagagctcccaagcaagagagggcagtacattcaaggccaatacattgggttcggcactccaagggcagagaagagaaaccagcctccaacttggtcctgtgaaaactggacttttcatgttgcacatgacaagggtccagccagaatggctaaaacaacccacactctgggggtacctcaagcaatggggatagaatcgaccctgaggatgcccagcagatcaattgcatgggccacgggccttcctgggatggaagggtgcgccttcctctaatcttctacccgcagggcccctcaggaggcttctttattctggttaactttcaggtccctccaaatgatctgtctttagaagggctccacctccttctaagtggcattcttccctcgagttctgtccatcccactgtgtgtgtatgtaagatagcaagagagatggaggcacacatgcatgcttatatcccatctcagcctttctccgtggcgggtcttgggcagtaattgaagagccggagcccccattctatgcagtgagccccactcttgccctgtgtggggagcatgtgggcagagccaccacaggattccctatcctggtggggaagagaaggcatgacttgagagctctcaccagagcctaggctcaggagaagagcaagccagtgggacaggaaggaagaggaggagaaaaaaggacagaccttgacagtgggatgaccaagggcagaatcctgggacagccaacagctgccacctcccaggaagacaggaaccagggccccttgacaggagcaagactcccacccccagtggctgagcctcctgcctgggaggttggctggacccaaccaggccggggttgtatgtgtcccccagcggggacagtgttggcagttctaaggtctcaagggccaacgggttaggcaggcagcaggaaggtttgtggtgtcagcccttttctagctccctctccctcatcctacaccatgtcccccgacaagcccccaacccaatcctcctcctcctgtcctgctcctcctcccttttccatttggaagaaggaggcttgctgtctttgtattttaactgtagcaaaaagattaaattgtttacgagccgggagcctctgctggttggatgagccggaagagacaaagatagacattctaattctcccccgttctccaggcctccgtccccctggctgctgctaattcttttatctgcccccaacactccaggcattatgtgcattcataaaaaagggggggtggagtggagagaaccctcgccgaagccagcaaaattactgttctctgcgcggtttctctgatagcaatctcttgaatgctgattacttttttcccctctcccctgccccctccccccttccccagcacccaacataagttggtctttaaccctttatctttagcaagcagaaagacatggaaaacatctcactcagtgggtggaaaaaaaaaaaaaagcaaggggggcaaggaaagaaaaaaaaacaacaacccagcacagagaagaattactgttatctcctcaccagaagaggaacagcagagataagggaagcctgaagaattaaaagaaacgtagcgttggggctctaaattcacgccgaagccggctgtatttgtctgtcacgggggttcataattttctgaggttgttttgatagacttattgtgcggactgcatagaaaactcatcagcatttgttgcctctgagcgttattgtcagaggtaactgcgtgtctgtagactgggggagataatggctgaagtagaaagcagataaagcccaggctcttctcattaaggactatctctgcctccgcagaccggccgggattgagtgactggggcggcagcacggggcatacattatgccagcaaaagcaaaaggcggcggcatgagtgcgggcagctggaggaccccgtggccctggatgaatggccgaggggagcgcttggatggtgcccgcagtgtggtcggctgcaggggtgccagtcggggacacccaggggctccctgagctctgggggtttatggcagagcaatgaggaggggttgcagtgcaggcaattctttggttccattctgacattgcacagagggggaaactgaggtctggagaggggaaggggtgtgtctggggcctcctactgagggagggcagagcaggttcctctgattctggggtatttatccagatccatgcctcgcctgtgcagtggctgagagatgggagcctcccataacccagtccactgtccacgtggagatgtggaggggtcatatactgttaatacctgtgggtccctccctccctcccttcctccagcacattttcttggagtgcccatgagaagccaggcactggggaatgtgcgggcactgtggtcatgggcgcactgtgtgtaaccccccagccatcctcctccctccatctactatggaactaccctctccagcaaagggggcaggcagacctgggcagagaggttcacagtgtcctcaagccaagcctaaggccagatggggacaagctgtgcagtgaaagactagaggctaggtcagcagaactgggctttgtgtagcctgggagggggacacttctctggcccctttcccatctgtgaaatgggaacaataatgtagcccacttcatagggtggttgaaaggactgatgagatagtttatagaagaaggtttgttagcacgttgcctggacacactaagtgctcggtaagcctgttattatctttataatgattgttcctctggtggccctaaggaccttctggacagctcagtactgcttccttcatctgacccagggtggggcctccagggaaaggcatctgagctgtaagtgaatgttttatccttgtcacatgctcccatagaggggaggccttggcgttgtctgagtccattcctttcagttggctgatgagaactgagcccagggaagaaagggcccagctcagggcacaccgcaggctccaggcagaactggacaaaggaccgggtctcacagccatggcaaaaccttgcatgctttctttggcagcatcctgccttctgggttgcttctgcctgggaggctggccaggcaggagagtactggtgcatggctgcagccatcaggggaagaggggacccaaggccctgccaccagccccagggaccctgagcccatatctgaggctgttctggtctcttgcctcctcagaatgacctgggccaggcttggaaatgccagcgcttttagcagttgattgatctgcatttggtttggctcaggccaactgagaggggcagcatcaacagcgcagggatttagtgattgagggggagatggactacagactggaagaggggctccggacagacgctggggagtctagagggtcagcctgggggtcgctgaccacagaatctgcagtatgagcacaggagccactctggccctgtaggactagtggggaaaaccaacacaataaaagttcttacaaacaaccagtgcagtgaatgagaaaactacaggagtacagaggagggaggagccagcctggtccagggtggggaatggagagcccaggagacagtagagtcaagactggaagattagatagtggacacggtggggaagggcattccaagcagagggaacagcctgtgtaaagacccggaggcaaagaagagcgcgggatgagtgggaacagtgaggaggtgggtgtgtgcataggggagggggaggcatgttgggaagaacctcaaatgccagaggaagaagacagggctttatccagtgcatcaatggggtcccctgagtgttccaaatagctggaaatgctcacctcctggaaaattgggctctaccagtgaccactgcccttgtcaactccctgccccgcaatgtccccagctgttattgagttagtgaactcaataaggggctgataaatgatggcagagcctggcaggagtggcagaatgtggagcggaaagagcatagactctggaatgcctgcatctcatggatttaaaattaaatctccgtttcaagttgtgtgactttgggggctaggcatgtaacctccctggactcagttttctaatctataaagtggggacaacagctgtctccaagcataactgtgagaattatctggggatggtgtgaagtgcctggcatgtcgcagccttgaaacaaatgccagttctccctcccccacccaccacaggctgccagcattccagctggggcagtgtgtcccagtaccttgtccttgccctcctcaggcagcgctcacctgcaggcagccctgtgggctgtcactcatcatctgccctgtgcccaagcattgtctcccttgcttttgctgacagtgatgtcctggctttggtcccagcctgtcctccttggcagaacacctggcatttcactccaccctcgcccccaaccggtaatacctgtcagcccagccttgccaacatccctagatgtgacctacacctgcctagacccacagactgttccctagacccttttggctgtccaggccagacctgtccctagtccacatgtcagttccgtgccctgtaacacagctagctactgggaggttctggaccctggaaggtctcagggttcccctgcagcttgggttgggtgcaggggtagattcagggtggcaggctcagctcaacctcacagagagagttatggctgagagttatttcctgagagtcaggaaacttggctgaaccctggctaatgggctgtgtggctgtgggcaatacactggccctctctgggcctcagatttttaaccaataattggagagaatccatccctaaggcctgttctggctctaatggtctcggattctaggaggaaagggccagaagtctgcagcaaaggtctgtaacccccttcctctgtgccctgaaaggggcagcaggaaagcctcatatcccagcgcagccccgcctccgctgtcttggcgaggcacgcactcactccttgggatttacaatgggctgaattcatttgcataacaaaattggctcgggtatccaagtgttgcaggaagacaagtgtaacattacgcagaacaagcagctgggaggaaggttaccaccaacaatgagggaacaagatgcccgcccacctgctgcctctgccaacctttcatccacaggcatggggggctgcccgggggcagtgtcaggggtgggggagaagagatctgcaggcatgggagatggctgcctgcccagggatctgggctgggtggatgggtcggatgggaggggaactcctgctcctagggtcttctcactgttagggtgaagaggtttcctttgctatttctaaatgcctgcaccatttaaatggtcccaaaattatctccccactctcaggacttgataacacaagaacttaaccactaaccatgcaccggtccactcatccactctcatccattcactcgctcatccacacatctgccatctatccacctgccaccatccatccgcctgccaccatccatccatccattcatccattcactcatcaatttacccatccgctcatctccccatccatctgcctatccattctttcatccttccacgcaccttcccactctcacccactcacctatacactcatctatttactaatccctctgcccacccatgtgtccatccatctatccttccatccacccactcatccacttactcatccaccaggcccctcattaattcacccatccacccttgcatccatctaacaaagccagatgttggacacgtgtttgtgccaggtacagcactggggatttctctgtgcctcagcttcttcgtctataaaataagggtaataatgggatctacctcacaagcttgaccatggcccagactaagtgctgtgtaagtgttttctgatgttaatcttattaggcactggggaatctaaaggtaaataaaacagagttgctgccctaaaggaaatcacacacttcctggggaaaaatgcaagaaaactggcattagggtccctcgtgggatgtgctcatctgtagggaaatattaagggttgcgggacggccaaagcttgggcgtcctgtctcattccaggctcatttgggaggtaggaggggacaagaagtatcgttattgatctttgtatattacagatgaggaaactgaggcctaggagagttaaaggaccgcccaagaccacaccaccgcacagagacaccaggactgaacgcttgtgtcttctgacttgcagcttccagcagcctggatcatgctcttcttacctcatctgggtagcaagagaaggctgctctaaagctaccttactcccaggttgcaggagcagaaccaagacgttcagatcccttgaggaagagaatggctcagcatgagggggcctcacccagagccctgggtctgctctgagcccctcacttaaagagggaagctgaccaaatgaggtgagcctgctcaggggactagggctggggaaggtggacatccatttggtctttggaactgaggcctgagcaatgcattctggctgtgctatgggtcggggggcgcaccacggagcttgacctcagcatagaatgtggattctgcttaacacacctgagggctgcatggggcacaggatggagatgtgctgtatgcaatcctaagcagtggagccaagatcaacccatgaaagctacaggaaaatatgcctacatgaaatgtacaggaaggcacatttgataatttctaactataatgatcagttcccacctcacagaactgttccaggcaaagtggtcatgtccttgtcactaaaagcactgagatgctagaagggggcacagtgtggtagaagaattgtggcctttggagcatgtcaggcctgagttcaaatccagatgttgcctgatgctatctgcgtgacctcaggcaagtcacagaacttctctgaggctagtctgaaacatgggaattagaaatctccatcacaatagcttgtgagaatccagtaacaatgaccaatgcttaacagtgtgctggcggggcgtggtggctcacgcctgtaatcccagcactttgggaggctgaggtgggtggaccacttgaggtcaggagtttgagagcagcctggccaacgtggtgaaaccccatctctactaaaaacacaaaattagccaggtatggtagtgcacacctgtaatcccagctactcgcgaggctgaggcaggagaattgcctgaaccccagaggcagaggttgcagtgagccaagactgtgccactgcactccagcctgggcaaaaaaagtgagactctgggctgggcacagtggctcatgccagtaattccagcactttgggaggctgaggtgggtggatcacctgaggtcaggaatttgagaccagtctggctaacatggtgaaatcccgtctctaccaaaaatacaaaaaattagccgggcctggtggtgcacacctgtaatcccacctactcgggaggctgaggcaggagaatcgcttgaacctgggagggggaggttgtagtgagccgtgatagcgccactgcactccagcctgggtgacagagcgagactccatctcaaaaaacaaaacaaaacaaaacaacagtgttctgagtaagtcttcctcacagccaatgtgtcagacaggtcctttaattgtttaaataaacttttcactttagaataatttcagctatatggaaaagtcacagaggtagtgcagagagttcccataagctccccacccagcttcccctactgttaacatcttacgtcagcggccagcatagtattttttcaaaactaagaaaccaacattggtacatttctccaccttactaatgaggtttcagaggcacagagaagctgagcttccagcccagaatcacaattcattatgacacattcaatgaaatgcaatgtaggagaatgctcagcactgatgtctttctcattccagaaaacctaggtgggtctgggctccactgtctgtcttattaagaggccctggcgggctgggcctcatctctgcacctgtgtccatcttccctgcagcagaacagagcaacagagcaagtggcaccagagagaccacccacggagggcacttcgtgaagagcgaggattggctctgaccagtgcttatcagcaggcacacagtaggtgctctataaggatttgttgcataaattaacaaatgagcagtgaagtaatgaagtagagagcatttcactttgtgtagaagactgaattcaggcacttccaggagcttttccaaatgtaaagctctgggagcctgagatgaccagtctcctccctagctgggctccattcctcccctgagaaattggaagcaccaatttgcatcctgtgtacagcaggcactcaacgcatgatgccgatattagtatctccacccacattttcccttggtcccaatttcacctccacttatttaaattttattttaccctgttgggcattttctgcaagctgtctccaatccttgaagggggtgtgtgtgtgtgcatgtgtgtatccatggtggtacataaagaaaccaagaggctgggcgaggtggctcatgctggtaatcccaacacattgggaggccaaagtagtaagatcacttagcctgggagttcaagaccagcctgggcaacatagggagactccatctctataaaaaataaaaagttatctgggtgggtggcacatgcccgtagtcccagctacttgggaggctgaggtgggaggatcacctgagcccgggaggttgaggctgcagtgagccatgatcacgtcactgtactccagcctgggcaaaactttatcaaaaacaacaacaacaaacaacaacaacaacagaaaacacaagcatggaaagaaagacactgtggagtcagtcactgatggtaataattggtaataatggggtaataatgtgtcggaggtgagattggtgggtggtcctctactttgaggttcccaaggggcatgccaggcctcgtgctggggatgctgtaatggaatgcctagcctctgttttcaggagctcagagcctggcagaggggtcagcccatgacaccagatgtggtaagaatcccctggggtcatcctgggcactccagcagagggtcctccaggcacccgcccccagaatcacacaggctgcagcatttctctgaaccaagggctcttagggccctggccctcacatgggaacctcctcaccacttctctccttcaaaatccttctcttcacttcctgtccctcctgcatctcctccttgtcccctcagcagccccacagctttgtgttggcctctgccccgcagtctcaggcctccatgtgggagtttgggtttggctccctcgggagactgtgagagcctcggaaagaggaactcggctcctccccagcatccagcacagtgcccctcaagtgggaagacgtgaaaaggtccctcaaagacctggtgctcccaatatacatctggccttggccccagtggcaggagccagcagcaggtctgaatttattcatctgcagggtgagaatgagaaaggagggcatgccccggcctgggaggataggccatcaccgagacggtcgcctctggggctgctaccgctctcccctcctccatggtgaccctgggagctctcggagcaggttcaactgtgttcatcaaaagatatggccaaaacctaaatcccagtgcccgtgacgtgaccttatttagaatagagtctttgcagatgtaattaaggattttgagatgacatcatcctgaattcagggtgggtctaaatccaatggctggtttccttatgagagacagaagaggcagatttgagacacagagaaacatagagaagaaggccatgtgaggacagaggcagagattggaatgactcccagctacaagcccgggaacaccaagattgccagcagcctccagaaggtgggagaaagacaaggaatagatcctccttcagatcctccagaaggaagcagccctgccaacaccttgatttcagacttctggactctgaaactgtgagagaatacatttctgtctcttgaagccaccaaacttgtggcaatttgctgcagcagtgctaggaaactaatgccgcccctttctctgtatcttggttcacctgtccccagcacgattttttggcaacctcttagaacaatgagaggacatcacccatccttgcccctcaatccaaggattgtgctgagagatctcaccagcaacactgccacctaaatgctggtaacttccagcacacccctccctgtgcctcagtttctccatctggatagtgaagagttgggtaagctgatttctaaggtcctttctagccttaagagtccacatgaccccaaactataaagctactagaagaaaacatgggggaaatgccttatgacattggtctgggaaaagttcttttggataagacctcataagcacaagcaacaaaagcagaagaagaaagtgggatgacatcaaactgaaaaactttggcccagcaaagaaaacaatcagcagagtgaggtacagaatgggagaaagtattttcaaactatgcatctgataaggggttactctccagaagatgtaaggaactcaaataactcagtagcagaaaactactcagaagactggggagggaggattgcttgagcccaggaggttgaggctacagtgagccatggtcttgccactgcactccagcttgggaccctgtctcagaaaaaacaaattatttgattaaaaatcaaggaacagacctgaataaacatttcccaaaagaagaaatgaaaatggccaacaagtatacaagtatatgaaaaaatgtttaacatcacttttttttttttttgagacaggatctggctctgtcatccaggctggagtgcagtggcacgatctaggctcactgcagcctctgcctcccaggctcaagccatccttccacctcaacctcctgagtagctgagaccacagatgtgtgccaccatgcctgactaatttttgtattttttgtagagacagggtttcaccatgttgtccaggctggtctcaaactcctgagttcaagtggtctgcccgcctcagcctcccaaagtgctgggattacagacatgagccacttcatttggccctaacatcactaatcatcaggaagatgcaaatcaaaactacaatgagatatcatcttaccctagttagaatggctattatcaaaaagacaaaaaataacaagtgctggtgtggttgtggagaaaggggaactcttatacactgttggtgggaatgtaaattagtattgccactatgggaaacagtatggaggttcctcaaaaaattaaaaatagcttgtaatccaagcactttgagaggctgagatgggaggattgcttgagcccaggagttcaaagttgtgatgagctatgattacaccactgcactctagcctggacaacagagagacaccctatctcaaaagaggaagaaaagactaggaagacagaaagacagggaggaaggagggagggaggggaggaaggagggagggaggggaggaaggagggagggagggaaggaaggaaggaaggaaagaaagtaggaaggaaggaaagaaagtaggaaggaaggaaagaaaggaaaaaggaaagaaaaggactatgatccaggaaggaatagaactaatatgatccagtaatcccactactggatccaaaggcaatgaaatcagtatgtcaaagagacatctgcagtcctttatttattgcaggggtattcataataatcaagatatggtatcaacctaagtgtccattggtggatgagtaaaaaagaaaatgtggtacatagaaacaatggaatactattaatccatgaaaatatgaaatcctgtcatttgtggcaacatgatggattgggatggacttggaggacattatgttatgtgaaataagcaaggcacacaaagtcaaatactgcatgatcttattcatatgtagaatctaagaaaattgttctcacagaagtagagagtaaaatagtggttaccagaaacagggagctgggggtagggagggtgggatggggagagattagtcaacagatacaaagttatggttagataggaggtgttctattattgcacagtaggagggctgtaattaatagtactgtgccaggcacagtggctcatgcctgtaattccagcacttcgggaggctgaggcaggaggatggtttgaacctagaagttcaagaccaagctaagcaacatagggagaccctgtctctacaaaaaataaaaagttagctgagcgtggtggagcatgcctgtagtcgcagctacctcccacctcggcctcccacagtgggattacaggcatgagccactgctcccaacctcactttgggcttttctttctttcttttcttttggtttttctttttcctttttttttttccaagatggagtctcactctgttgctcagcctggagtgcagtggcggcatgctcttggctcactgcaacctccgccttccaggttcaagcaattctcctgcctcagcttcccaagtaggtgggattacaggtgcctgccaccaagcccggctaatttttgtatttttagtagagatggagttccacgatgctggccacgctggtctcaaactcctgacctcaggtgatccacacgcctcagcctaccaaagtgctggggttacaggtgtgagccgccgtgcccggctcactctgggcttttctaagctctctccattagtccttacaacaaccttgtgaattaggactcaataccccaattccacagaggaggaaacgaagaagttgcgggggttggcttccttgggccgggccagggattctgcagaagtggcagaggtacccctgtgtgctgtccagcttgaagaatggggcagggtaggggcacagtcttggtgagggtgagagatcgcttacaaggaactgaaacattcaaacttatttaaggcgaaaggaaagagggaagagagggagggaggaggaagggaaaaaagaaagactatatggggggatttatgggaggattcaggggtctctgccactgagagcccactcaggccccccagtccccttgccgtcccagtcaactgcagatgctaaattctcctcagcagcccgatctgggggagggcactctaggaacacgagattgggcctgtgatgtcgggcatgtgaccaggtggtgcccagagctctgctgaccgcaggggtgacctcagtgaggggctgccccacttaggccctcatgcctgtcttctgccaagtgagggctctggctctcggctaagcaagtctgtgatccatctgctctctctaattaataatgacagtagcaccgcttcccgagcattgattgcactgtggccctgagattggtgcagagctggctgccccacaccaccactttctagctctgtggcctgaatgagtttcttagtctccaaaccttcatttcccatctgaaatcgggatgttctagctcccacatagacgtttcagaaccagccgagctcatgtgtcagtggggagctggggacacagtaagccctgtttctcagcatcatggctctgtcattattcttattcctacaacactaccaacatcgaggacataccaagcacggtactaaatgacttcttaactcattagtccttatggccccagagaggaggagactaaggctccgagaaagcacctggctgctcacatcaggcccatggtccacagcagagccctgcacacctggtgagctgtgcgactcccagacctcactaagccagagcccagcagagtcttccaaagacaacagaatcttcccacgttcagtgggaggaaggaggaagtatttattgggcatctactgtgttctcatgatgaaatttaagttttacacctgatataggtggttggtctaattatgttcaaggtagagatgaggaaactaggcagagaggttccgtagcttacactggggcgtctggcatcggacatgagagccaggagcttcccagactggagcactgcaggtgctccagtgggtggggtgtgtgctggggtgtgtgtgtatgtgagagagagtgtgtgggtgggagcgtgtgtatgagtaggggatcaatgtttgcctcctccttcctcccactgaactgaccacagggtgtgagtgcatgtgtgtgtgagagtgtgtgctggtgtgtaagagtgtgtgctggtgtatgtgtgtaatagtgtgtgctggcatgtgtgtaagagagtgctggtgtgtgtatgtgtgtaagagtgtgtgtgctggtatgtaagagtgtgtgtgctagtgtatgtgtaagagaaggtgctggtgtatatgtatgtgtgtaagtgtgtgctggtgtgtgtatgtgtatgtaagagtgtgtgctggtgtgtgtgtaagggtgtgctggtgtgtgtaagagtgtgcttgtgtatatgtttgtgtgtaagagtgtgctggtgtgtgtatgtgtatgtaagagtgtgtgctggtgtgtgtgtaagactgcttggatgtaagagtgtgtgctggtgtgtgtgtgtataagagagtgtgtgctggtgtgtgtatgtgagactgtgtgtatgggtgtgtgagaaagagtgtgtgagagaatgtgtgtgtgcttgcggatgtgtgagagagggagatggggatgtgtgtgtgcctgtgagacaggtatacttctgtgtatgtgtttacgtgtgagagtgtatgtgtatgtgtgagagtatgagaatgtgtgtgtagtgtgtgtgtgcatgactgtgtgtgtattgtgtgttcgtgtgtgcatgtgtgacagagtgctgtgtatggtgtgtgagagaatgtgctgggtgtgtatgtgagagtgtgtgctgtggtgtgtatgtgagagtgtgtgtgctgggtgtgtgtgatgtgagaggtagatatatgagtgtgtgagagggaggaagagggtgtgagagaatgtgtgtgagagactgtgcttgcgggtgtgtacgtgagagggagagagacgcgggagagtgtgagagcgtgtgtgtctgtgagagagaaaggtatacttctgtgcatgtatgtgttgagtgtgtgagtatgtgagacagagtgtgagtgtgtatgtgtatgtgtgagaggaagagagtttgagagaatgtgtgtgtgctgtgtgtgtgtgtgtgtgtgtgtggccagggagggggcctctgtctcctgggctccttatatcagggacagtgtctgtgcggtgtggatgggagtcatagggaggcctgggagctgagagctgggagcaggcaccagcctattaatgccgccctcctgaggtgggtgcagataagtggccccaggggccgggcccgggctgaggcccctctaactggcttgttgccatggagatgctagctgtgaatacaggcctagaagtccagctcaagcctccccttcctggcaagagaagacccccagctggggtgtgtttgtctggcaagggaactgcagagccatgccgtccacgccccctcccccccattatttaaagcaaaggcttccgttccttccattttccctcaggagggctgtcctgggtcaagggagaaaatggctgtcttgatggtcccgacactggggaatggtgggtccccttgcggttgggtgaccagggcaggcagggaaacacatgtggttacgcagccacacctgtgttccagaccgtacagccaaccccacccagcgaccagactcctgctggcatcggggacgctgagaggttcgggtgggtccccgagcaggggcaagtttatgtgaaaaccaccagctctcctgaggtgggttctacctggagtcaggacacgtgagggttttcgttaatgttttcttgtgaaaaatttcaaacattaaaagccggagagagcatttaatgaaccccgagtacccactactcagttgcaacaattattagctttgtccatctcgtttcatctgtcccctcttttttttttttttttgccagggtagttgaaaacaaatcccagatatcaggtgacttcatgtggaatgacttcagtaagtacctctcactaactggccatgccaggatcacacctgaggaaattaacagtaatcccatggtgagcgtcagctgacactcagtccctctttaactgcgccccgcctcctcccgtaaatatgtaaacccacactgcaagggtggatggagggccatgtggccgggcggcttctgtgctttagctttggagccttaagagggtgagggttgaatacctgtggctttgggtgggtggtttgctttatggggcctctctttcttcctatgccaaaggtactgacctctcccaaggcggtcaggaggactgaatgaaattgtatgagtacagtactgggtacttggtagggactcaatgaatggtggcagtgcttacgatgttttctattttgcatataaggaaactgaagttcagagcaggagagtgacttgctcaagctcacacagctcagagtggttaagctaggatggaagcgtaggtcttctaagtgctctgggatgtgtgttcaacacagccccctcaccccctctaatactggccttgtctgccaccaccccatactacaaatggaaatgacacagagggtgacatcaacaggtccctttttctcgatagccactagatcatggtgctgtgggctgagcagatgattgataggacatcactgggcctggctctccaggagacctagaaaaagatcttgcccctctctgggcctcagtttccctatctgtaccacaagggcattgacctccacgtggtcttcgagacctcttccagttctgctttgtttgcaccagggttagtaaccgtgggaatgggagagatggagatacttgaggctgatggggagttgcacagcccaagaccccaggctgcaagacagtatggggatgagggcgatcctcccatattggagatcagggatggggtggcccagctaggtagaagtgaagctcccccacccccactggattgtgaacctcctgaaattagggctgtgacttgtaccttataagtatcacatagatgagaaaaaatttcatcgatgtaatggatggaacactagataggagatcagtaaggaaatagaagactttaaaaacactgtaaaccagctagacctaacagacactgctttctaacggcgattgaagagcacattccacccagcaacagcagaatacacattcttctcaagtgcacacggaccattctctagcatagatcatatcttaggccacaaatcaaatctcaataaatttagaaaaattgaaattacacaaaatatgttctctgacaacagagtaatgaaattagaaggtcaaaaacagaaggaaatttgaaaattcacaaatatgtaaaaattaaacgacacactcctaaccaaagggtcaaaaaataaatcataagggaaattagaaaatactttgagacgaatgaaaacaaaaacacaacatactaaaacttacaggatgcagtaaaagcagtgctcagagggaaatttatagctgtaaacacctaccttaaaatagaagatctcaaatcaataaccttccaccttactaaaaaaaaaaaaagcaaactaaatccaaagcaagcaaataaaaaaattagagcagagataaatgaaacagagaacagaaaaacgatagagaaaaatcagcaaaaccaaaagttggttgtctgaaatgatctacagaattgacaaacctttagctaaactgaccgagaaaaaaaaaaagagagagaaaactgaaattactaaagtcaggaatggaagtggagaccttgccactgaccttacagaaataaaaaggattatacaatttcactgatagattcgaaagaaactccacaacatttctagagattggagagaacatccggaaatggttaccagtagttgccttcagggaaacagggctggggtgggtggagctggggtgcctgctttttattataagtccttaagggctatttttgtaaatgctttgattgcaaaatataagacacatacagaaaagtggatttttaaaaagtaccgctcagtaatttatcaccaagtgaatatccatgaaaccaccacttggtcaagaggaacattaccacctccccagaagcccctcctgtactctagccaatcctcctccccaaagaaaaccaccattctgacctttatggcaaatactcttgctctccttgatagttttgccatctctacacacaatagttgggttcagttcgtgcttgataaatccaatcaagtagcaggtcctcttttgggtccggcttcttgcattttacattctgtttgtgagattccccatgctgttgtaggaagcaatcgttggctcaaattttcttagctgtatcatattccattttatgagtacaccatcatttatgtgtctgttcaactattgatggaatgggctttttaaaaagccatgtacctaaagataggttgattaaaatatttctgataaaatgcacatttaaaatgcaactcaacacatattagtttaatttcatccctaggatcctcattcccttttctgctccaataagtcatgaagacagcttgggtctcagaagaaaataggccgtttaagcagaagcccagagggaacacatctgagagatgcccacaccctcatggggtcctctcatcagcccttctccccaaattttcagcctcaaatgggggaggtcacacagatggagagaaaccactctctcccttccacccgaggtctgcagattcctgacacacatacgagtgcacacccaggcagacaggcaagagcgtggcccccacacatgagcacacacacgggcacctaggcatatcccagaagtggcaatgcctgctggcacctgaccagcaggcgaggtctgtgcacagagaagttgtggaagaagaggaggggaaagcgtgggggaaaaatcccctcatttctgaagaaatgtcccagattagatttgtaaatcaaaaaccaatatataacatgcaagaattgatctgttttatattcctcagttacatttttgtgaagcacatttagaagatttagaacgtatttgcgcctgctggttgggccattatatgcttgagttcatacatctatttgtgaggctataaaacaggcatcgactaccatgtaaattgtgttctccacaataaattatatgcatacttgcaaaaatacataactgccgtgcctgggccaacgcggccagaatactaatgagggcgaaagttgctttgtccctcttctccggcctaatttagcctctacatcaaaaattatgtaggaaaaatcactttatcctctcactgagaaataaaatagcactcatgggtaccctcatctcttcccaccccccttccttttaaccgaacactaccattttcatactaattttagctgctccaggtttacggggaggaaggctggctgagctgaagctggggtgccagcgggctgcctggatgtatgagaaggctgtgggagtgggcatgtgcatgcacacactcacacacacacatgcatacacacgtaggcacattccctccgtgtggtttgaattcgcttgtgccagggcatgttcacagcatgcacacagacctacatgtaaatgtgaagactcaccccagacacgcatgcacagacactccacgagcatttgcccacgtggcgcagattcattccctctccccggtacagactcctatgcacagagacacactggggaaattcagttcagttcggttcaattcagttcaaacaggtcagtccagcaaacactgactgagcacctattagatgccatgtgctgtacttggcattgggactacggagatttttttttaaaaaaggcagaatctcagcttatagctcaggggaagaggcagctttaggaacaaatgcagacaagtcagtatgctgagggctgtagcagagacagagagcatacaggtacacacactcacgccctggtcattgtcagtgtgcatattttccagtactcatatgtgcacacacagatgcacacagagtccctgcacttacacaggcacatacctcacaccacatggactcacgtgtgcatgcacaacacacacatacacacaccggtacactcaagcatcagcatagccaccctcccactgacaccgcatgctggtgcctgcctcacctctgtctttcctgcaagcccaagttaacttcacgccctgtctggcttgccctttcttgggttctgttgctgtctatcctggaagcagagccacttccaacagcaggctggctagtgttgctcccacttctcccaggggcctgcccaaggttccatcttgctgggagcttccgcaggctcacaagaggaaggagaagtagacacaggaagatctcatttccatgacctcaggccagtccgtgccctgtcccaggcctcagtttactccttttctttttcttttttcctttcttttttttttttttttttttttgagatggagtctcactctgtcacccaggctggagtgcagtggcgtgatctctgctcactgcaacctccacctcccaggttcaagcaattctcgtgcctcagcctcccgagtagctggaactacaggtgtgcaccactacatctagctgccttttttgtatttttagtagagacagggtttcaccatgtttgccaggctggtctccaactcctgacctcaggtgatccgcccgtgttggcctcccaaaatgctgggattacaggcgtaagccaccgtgcgcccggcctacccatttttaaaatgtgggaattggatggtctctgaggccatcaggctccagatgtccacagtttgtgctgaagaaggtggcgcctcagtccaagtcagagagtgtgagacaactgcagagacgcccccaacctggaggcatctcggccccgctccgagctcccagcctaagagaagcgtttgacctcaggggcaggcctcatgagggcaggagaagtcatgtcctggagaaaaggagtggcaagatgtggtaggggagagaagacttggtgcaagagggccagctgggatatttataggtgccagccacggttctaggggaatttcattctatcttcaaacacctgaagggctgccgtggggcagagggaaaggacttcctctgcatgacccagttggtagaactaggacagtgggaaagtggtggaggctgcaaggagacagacagcctttagttgaatacagtgatcagcgtgatttctccgtgcgtgcacccgcctaccagcatgcgtggtgtacattctgctgctgtgtattccgtctccttgcagccctttctttcctctgctccctatagctcatcctatggcttttcataccgtactattttctctttatctcagcttgttcttggagtagaaaatatgttctttttaaaaacgaaaatcagatttttattgaggaaaaaatattaagttcacatgatgaaaaattcaaattggtcaaaggatgtatggcgaaaagaaggtctctctctctggctgcccaggctcctccggctgcccaggctcctccggctcatcgtcatccagcttccttctccagaaacaaccactgttaccaattgttatgtgttttttcagaaatatactgtgcgtgcaagcatctctctctgtctgttgatctgtcctttatttaacacaaatgtgagcataccatgtgccctgatccttgcctcccctcccctcccctcatcccaacctaactacgtagcttggaaggtgtttctgaggaaaagttctccattgggcgatatctgacaatgaaatgggctaacgagctctcaacactggggatgtggaggcacaggctagatgaccacttggggaaagaaaaatgggagagttgggcccttccttggaggaggaaggttagactcatgccgtctaaggccctttccatgaaccagctgcttggatacaaagagaacagctctctttatcttgcgttcttcccatttttccccactccctcccagcgccccacaagctgggccagggtcaccagtgtttaaagccgcccagccttggcttccagcccttgtgtaattgacaagaattccccccctccctaagagatggcctctctctgtgccagccacatgccactaaactccaaattaagaggcccagctgagatttctgtcttattccacccatactcctggggccaatcctctctcatttcaggaggggaatggaactcagtttggatttgggaaggggggtagagggggctcgccaccaaagctggtgcctctatgctccagagagatgtgcgtgtcctaccatgcggcttaagacttctccaaaacaccgtccccccaaatccaataaaattgcaaatttcactgtatttcacaatatcctaaataaacatgaacagcatgcgtttctcttccttgcatcaaatattaatctgcccgtggccagcgcccgctcccccgcgtgtgtgcgcacgctgggtaaacactggggagattgtgatgccagaccttcccttctcttccccgagtcgagagcatgacaaatttttctcctaattacacctgccactgtttgccttctaatactgtaaatcctccatcacatagtttttcagattcgggattaggttctcttcctgtcgtacgaatgattggagggggcagggatgggggaggaggctggggtggtgtgggctgcatggccttgctttccacgatttcgctgtgaggactcctgagctgggcaccagcagtgtgtccaggcacctcgcccttcttcagggtgggaaggagatgtcaagaggcagcggggaggagggaatggagaaaagatacctgtgcaggtgtacagaacctgctcaacccagcttcattagcccccgctaggtgcccaggagccctggagataatgaagcttctgagatccaagcgagaaggtgaatgtgcagcttctggtgcggtgcccagcacggagttggtggacagtgacctggagctccccacttgctctgtctcctgactgaagccatcctcatctctctcctggactgtgaaacctggcttcccactggtttccacctcacctcacccctctccaaagaacccattgtccccagctgccagaggctctttctaagcccagagccctccatcgagacaggccctgtctcagaactccagctgacttcccaccatgtttgagtcatgtccagccccatcctctacggccctccaccaccgtccacctcaattctcctgcctcatgccccgtcctcaggcttcctgtccacccaccgtagactgagcctacctcgtccaccgcctcacccttccccacatgcgctgtgcaaactgctacctcctcttctttgctccctctgcctggaatggatgcttgttgaaatttcagctttcttcccaggtattcacccccgatgacgtcacctctttgaagccctcctttgtgatcccatggagcttcacatctaccatgtttgggactcagatctttgcctcatctgtcagtggtgtaggagggtctgtaggtgctttcaaggtggagtccaggtcctaagcatctctgtccctcaatacctctctagtttccaagtcttggcactgcagaaggatgatacctggtgcatggtcggggggagcgtcctgctgtttctaaatctcatgaccaagtcaactgcctgctccagctgtgggagagaatgggcagctgcccacctggcaggtaatagggaaccccagccagtgcaagaggatcaatccctccaggctacggtgacaggaggaggaaggaggacgttgaaaagcccagaccttccattcccttccccgctgcagcgtgcgctggtctgatagggtcccctcccagttgtctgtgtgtctggagcatccaagctgtacaaaggacaccgaatcattctccaggggttttggcgtatgcagtgttattggctattttaatttggtgaggaaatgcagataacagctttggcttcttattaccctccgttcctagaggcccttctgcctccaggtctgccccagcccattggcgcaggaggaccccatcccactgtgtctgaaacctcgagctgggctaagaggggcagtcttaggcggggtccaggctaccctggtgaggtctccatcctttcaaagctcccctggagttgttctcgaagcctcccagagtcagcttgttcagcttgaataatatctgtccctggccttgtcccctccccacacatttcaccttcaaagggccaggagaaatttccctaattaattaactcctctgcagcctgccctccatgtcattgggtgattaatcgtcactgtgactttaaatccaggggcggagggaagttggcaggggtggaggccagaagcagggatgctgggggttgggggaggcagcctgagggcctttcctggggttggaagacccccacctcatccccattcttgtccttgcccagggcctggccaagaggccccagagccagaccacaaatacatccatcaataatcaatcaatgagtctcaaatagagacggtgagaactaggccattctgggagaggcggggtggctcctgcctattctaaagtctgcaaaacagggtagcagttaagaacatgggctttggagtcaggaggaactgagttctaatcctgactctttctctttccagccgtgtgaccgatggcaggtcactttgccttccggggcctcagtgttctcacctatacaatggggatgagcaaataggacctacctcccaggacacctgggaggatgaaatgagatcacgtgtgtgaagctcttagcatggcgtgggggacacagcaagtgcaggggacgcagcaacagtgtggcggctgctacatcacggaggctgtaaggccagactccttgtccccagtgcccagctaggtcccttgcccccccggctctgttgtctttagtggctcttcctcctcactcactcctctgtgcagtcacacagcccaacccagctgctgcactcacctgctgcatgaccctgggcaaggtgcttactttccttacgtctgcatttcctgatttagaaaacagggtaaagctgccctgcctgcatgcttccaaggctctggcacacacacaaggatgtagcccagcccttcctccaaggagttccatgacaggaaagacagaaggggaaagaaatacttgcaaattcggtgtgagctatgacagaggtgcacggacattcagcaggaggcaggcaatggcatcacgggctcagagtacagtgagggtgaaagaagatgattccacacataatagttgctcagtaaacatcttttcccttctccagccttactctttccatatagcctaactttttagactcagctgctttccacctcagaaccccaatctctgtcctttctgctgagcctgcaaaatctggaaggagggatagaagacgggccccttggggagcccctcctatcatcaccaaccttagttaacatttgctgtttactgtttccaggcactgggcaggtgttctgcatacattaaaatctaattgaatcctcacaacagctccacggaacagttgtcaaggctgacccagaacctaagggagacagaccagagggataaatccaggtaggcttccactggggctgcagagacttagggttttaaaaagtgggtgctgccaaagaggggcggtcccatccgaaaaagcaaatgactggccctcagactcctggcaagaccccaggaggcctgtggtgctcaggtttattcacttcattcactactttaaggaagcttcattgatcttgtgccctgtagtggggagttcagtaagcccagccccatctcatctcagcagctcctctccaccggagttcagccaccccaggcgctctgcgagacagatacactggtgggagcctgggtggagggtaggggtttgtcctgcctacagaacgtgtctgggacttaaagcaggctcagaggaatctccgggatctttcaatgcagctccatgctcccagtgagtgtgtggtgtggggtgggcatggggcagtgaggagcgaaggggtgtggagggagggggaccagccttgctcaaggtcacaggggttcttagtaatagaacccagaccactgggcaccagggttttccagaacaggattcctagtgggtgtggtgtggctggggaaagggagggctgtgattgctgccatatgggggtagggggagagctgtcagaaacagcatttgggggaacaatcagggtggaaacagtatccagaaggtcagggtgccaaaattttgtaggcagcacagggtaaattaaacaggttttgaagcaaacacacatatcttactgccccgccccttctcaggctgtgcgaccaccggcaagttacttcacctctctgggcgtcagtctgctgaatgtaaagtgcttagttctcagaaaggctaagacaaatatccattttcttctttttcctttcgctacttgccccctccctgggagcttcaccctcactgtagttcctggtggactcattcattcattcgacagggaaccgatttagtaccaggtactgttctaagcactggagataaggagtgaacagacaaaaacatctaccctcagggggtttacactctagtggagggagacagacagcaaattacatcagttatttaagtgtctaagtgcttgtataagtgctatacagaatgaagaggaaaggagacatagagggtgttgtgggaatgggttcaattttaaagagagtagtcaaggagggcgtcattgagaaggtgacatttgagcaaagacctgactgaggcaaactctgctgatttttggggaaggaactcctgggcagagggaacagccagcacaaaggccctgaggaaggattggcctggccagttcagggagaggcgaggaagccagagagaccagtggaaggagggaggccggcatggtaggaggtaaggtcacggggaggaggccaagggagccagatggggcagtgctcacagaccattgcaagggctttgactctgaaggaagctgagagccaggcagggtttgagcagggcagggacacggtatgacttagaacgaggttcctctggctactggtcaagagcaggctgtggggcaacaagggtggaagcccatttggaggctactgcagtcacccaggtgagaggcagtggtggagagcagtggtcagattccggatgaattttgcagggagagctacccaggttagctgatggattggctgtggggttgagtgagaaagaaaggagtcaagggcgacgaggctcggagaggttagggtgggctgcttctgagtgtgctgtgagccagtgcctttctcttgtacagaacatgtccagactgctgtctccaatagcctataccctccagttcccttctctcctgctccgtggagctctgtggcagccatttctactacagtgtgggccttgcatgggagctgttagggaggcatgtgcacacacacgcacactcacatgtgtgtgtgttcatgggctgcctccaagagcttcgatcctgttttatgtgatggcatgcaggcctccctcctctgttttatgtgattgcatgcaggcctccctcctctgatgaagaattgctaaggaggccaggtgttgtggctcacgcctgtaatcccagcactttgggaggctgaggcgggtggatcacttgaggttaggagttcgagaccagcctggccaacatggcgaaaccccgtctctactaaaaatacaaaaattagccgggcatagtgctgcgcgcctgtagtcccagctacttgggaggctgaggcaggagaatcacttgaacctgggaggtggagcttgcagtgagccgagatcacaccactgtactccagcctggatgacagagcaaaactctgtctcaaaaataaaaaaagaaagaaagaaagaaagagaagaaacgttaagaagctgaagcccttccatatgtctgagccttggtgtattcatctgagaaatgggagtgaggattgtggaagaaccctgggttgggctgagggctgggcaggtaggagctagaatgcctggatgttgttgccatgaagctaggagagggctggaggttcaagaaggtttctagatacctgggttgggggagggggtgcagagggagtggggtcaaggtatgaggcatgagtcaagggtgtggggttggagggtggggtgtgagaggtgggccctgggaagagctgagggaccagtctgggaggggtgaggtgcttggtaagtacttggtagagggcgcagcaggtactctggcgagatgctgggtactgcagcatatatgcagcgtgcatgatgagctctaggtgttcggggctctctggtgaacgcgcatcaccttgtttacctcctttcatactcctgtccacttcgccagctccacactgccccctggcagtgccttgtgtgcaccagaagtgagttctccctggggccttggcattccgttccctctgccaggattgcttatcctggatgtccacgtgctcttttgccttctccatggctttgctcacaggtcctccccagccaggccttccctgaccctatccaatctgcagccccacccagcgctccctcttcccttctctgacttcatttctttccatagtgtgtgtcaccgtctttcatctatttcactgattttgcttattatctccttcctctagaagctaagctccatgtgggtagggacttctggtttttttgtttgtttgttttgtattgtttttgagacacagtgatgctctgttgcgcaggctggagtgcagtggcacgatctcagctcactgcaacctccgcctccggggttcaagtgattcttatgcctcagcctcctgagtagttggggttacaggtgtacaacaccatgcccagctagttttttgtatttttagtagagactgggtttcaccatgtcggccagactggtctttaactcctgacctcaagtgatctgcccaccttggcctcccaaagtgctgggattacaggagtgagccaccacacctggcctgttggtttttaacggtggtgaaatgtacatacagtacttactatttcaatcatttgtaagtgtacaattcagtggcattaaatgcattctcactgttgtggaagcatccctgtctataccctatactttttcatcatctccaaaataaactttgagcccattaaacaataacttccccatccctcccccccccagctcctggtaacctctattctattttctgtctctgaatttgcctattctgggtaccttatataagtggaatcctacaatatttgtccttctgtgtttggctaactgtacttagcataatattttcaagttcgatctatgttgtactatatatcaaaattccatttctttttatggctgaataatattccatcacctgtacacacaatgttttggttacaactgcgtgctctgtgcctggcatagtgcctgactcatggtcagtgctcagtaaatatttgttgaatgactgagtgaatgaatgaatgactgagtgagtgaatgaatgaatgagtgaatgaatgaatgaatgaatgagtggaaggggtgatgagtctttatggttttgtttttgttttagaaccatcgtgtttgagatcctagagaagtgtttgcatagagatgacaataagtgcccctgggtgttgaggagaaaggaggatgaggggtaaatggtgtgtgagcaagggtatgaagagggggtacagctggtctcccgaaaggggttccttcctgccctgggcagagcacctccaccctcccttcctcactccagaggagcctggggcgggaagtcttctgcaggaatccagtctcagactccctgcccctggcctgctttggcttctcctctccctttggggtgcctggagtgtatgtggggtgctcagagcatatgtggggtgctctgtgcctcgggagggggccccaggtctggcaggctggagatgatgtccctgctgggcagctgtcctcaacctgagattgccgagggtctgaactcacccatgagagggtccagatgtccagcctcatccctgctaattagtgcaattaattagcaactggcttcatggccctgggagtcctgagctcctttcgcacgctggaatagtactgcaaacaggtgtcgggggaattatgggggtcagtgaaggagatagactgtaggctgacccttccctggacagagagccccctgcccaagagtgattgtagtggcttttctctcttctgtctggctgggcccaggaaagccatgcctgggaagtggtggaataaagggaggaggcccaagtcccacagccagagctgcagaaggagtaggaaacacggtgtcacctattccgggtttttgcaggaaacctgggctctgccagaagattccctgacccctgcaggagatacagcccctgtcctgggagatgtccccagtttgattttgcagatacaatcactgccctaggggagctcctggtcagattggggaattaagtagaagacacaaatttgaggctgggcgcagcagcttacacctgtaatcccagcactttgggaggccaaggcgagtggatcacttgaggtcaggagtttgagaccagcctggccaacgtggtgaaatctgtctccactaaaaatacaaaaacaattagctgcgtgtggtggtgcacacctgtaaccccagctactcagaggctgaggcaggagaattgtttgaacccggaaggcagaggttgcagtgagccaaggtcatgccactgcactgcagcctgggtgacagagtgactctgtctcatgagaaaaaaaaaaaaagggacacaaatttgagaaaacagtccctgggctctttgagtaacacagagataagtgccaaaggaggaggtccagagaagggagggtgggtcctagggggaggagctgtcctgctgaccttgaaggaatagagggcagatctcagcgggatgcccttgaacttcccggaaacagtgagccgcagcactgagttgggactcatttgagggagagggtggccaagacacagtacagaccaggcccgcaagagccttcagacttcaagctggagaccgtgggcaccgcacccactcaaggttggggagaaaaaccgccattgacctccatgaataggggctggaggggtgcgggcccagcttgggggatagaatcagagaagcagcaagctcccaccacttagggaagatgttcctggtgaacgtcattgctaccaactggccatgagcaagagaaagagggtggctggggagaatcacagtctggagggaggtgtttgggatgaagggataagtattttccattttgctttagcttttttaaaggtcccagaggggcatttacatagagatgacaagctatcaggagggggtctggggctgaggaagacggtcaggccagaggttaaagattcaaggcagcctcaacacctttacctggcactaatgagatgttaataaagatgtccctattcttctatgtgtggtctatggaacagcagcatcaacaccacttgagagtttgtcagaaatgtagaatcttgggtcccatcctgaactgactgctacggtttcaatgtctatgtcccctccagaattcatgttgaaactgaatccccaatgcaacaggattaggaggtggggcctgtaggagatgattaagtcacgaggcctccaccctcatgaatagattagcacccttataaaagggcttgaaggaactaactaggccctttttgcccctctttttttctgccatgtgaggacacagtagcaatgtgctgtgctggaatcagagagcagccctctcagacacagaatttgccggtgccttgatcttggacttcccagcctctagaactgcaagaaacaaatttctattatttatatattacccagtctgtgatattttcattatagcagcacaagtggactaagacacggactaatcagattctgcatcttaacaggatcctccagtgattcgtgtgcacattgaagttcaacaggctctgctccagatgctatcattattctcctaattttatggttgaggaagctgaggctctgatggtgaagaagatggcgaggcattggctggaggggagagttcaggtacttaaagtacctgggtttaaagttcaaggggcataagtttcccagtggggagcagggaacatatgttgcacagtgctgtgctagtaaatgtttaacaattgatttgaggaatgggggggagtcctgatttgaagtgtttgccaatttccatggtgtaactactcccaccatggtgaatttcaaattactaacctggtgtcactgaacatggccttggaaagagacaaccatgattggctccaacacaccactgatctatatgtgtacatgtattttcttagcttcagagaaaaatccaaagaaacagatccaacccctcccccaccagctttaacctctgttcactcccaccacacccctaaatatggacagacagacagactggcagacagatggatgctgctgtgctagtacctctgcatgtgattagcctacggtgttgcatgtgtctgtcccctttcttggggataggatcagtgacatgttggcctctgccccgtatcctaactaaatgtcaccttcagccagactgttccagcaggttttcctcagagagtgagcgctgggagcttggagcccaggcctgggtagatatcagtggtcagacatgcctagtttactcttttcacctggaaacttgatttctcctaagcctgagaccactgtgtgggtggggcccgagtaagcagcctggcgccatgacccgccccagctgtagcctgttcttcccatattacccagagccttccgggtctgggctgctgccccccgtctttcttttggaaagttgaggaccatgggacgcctgcgcagagctcaaagctctagcttctagtcttccgttgctgcttattcatgggtggtcctgggaacccatttatgacatttacacacttgtttagggtgcttttgcattcatgaaacgcttggatgtacattgtctcatttcatcctgataagaatcctgcagggcaagtgctattatactttattttttctttttaaattcattagaatattgaacttttttagtcagcagaggaagcagggccttcgtggcattaagagaattgtgtgacgtcaccaggctgggaagggctgggctgcactgcagctgaggttcagtttacccaccagtaagcgagatgagcagactcagttctctttaaagtctcttccagctctgacattctggacattggaaaggtcaggggaaaaaatgccaggagctcttttatttttttaaacagggacattccgcagagtggactgggtgtctgcgagtgcatggatatgtgtgtgcatgtgtgtggatgggtagacatgagtgtgtgagaatgcggctgtattgagggtacatgaatgtggatgtgtgtgtaggcgccaaggtgtgcctctgggtgttggtattgtgtgtacaggtgtggttgcatctgtgtgtgcaaggtgtgtaggtgcataggtgttgctgtgggtgcagggtgctgtatgacagtgagtgtgccagtgtgtgacggagtgtgtgtggatatgtgaataggtgtgtatatgtgagtaccagtgtgcaacagagtgtgagtgtggatgtgtgaataggtgtgtatagtgactgtgctggtgtgtgatggagtgtgagtggatgtgtgaataggtgtgtatggtgactgtgctggtgtgtgatggagtatgagtgtggataataggttatggtatagtgagtgtgcccagtgtgtgacggagtgtgagtgtggatgtgtgagtaggtgtgtatagtgagtgtgctggtgtgtgacaaagtgtggatgtgtgaataggtgtgtgtagtgagtgtgctggtgtgtggagtgtgagtgtggatgtgtgagtaggtgtgtatagtgagtgtgccagtgtgtgacggagtgtgagtatggatgtgtgaatagatgtgtatagcgagtgagtgtatattgggagagagaaaacgtggcgcagcaccaattgacgtctgtctgtccctccacctctcccagcaccctcgtcccctcctccccaccctgtggtcccttcgtcctgatcctcaaaggctctgtgggggttctgcggctgaacgcctgcctgcctcctccccttcccccactgagggccaggacacactcccggccggagcgggtggccacagtccctttcccctgggccagtgcctgcgacgggtgctggattagccgaggagtgatacaatggcacatacggtcctgagtgccgggtgcggcccagggccccttactcagtgccatcgggattagagctaatgagttggaaggagttaacaatgcttcgggccagcggaggcccaggagacctctcaggccccgcgctgtggccgcctttcaccactgaggtgtaatccgctttgaaatcaaaggtggtacaaagtatgaatttaaatttgacatttacggctccggtgagatgacgtattctggaaaggtctcttcttctttaagggggctgggggtgggggagaaggcagggggaggggaggagagtgaagccatctgctctgagaggaaggcccaggcttgtccaggcctggccaactttccccccatggcttgggctgggggaaaggggtggggtgggagttttgggggcagatgagaagaaggagggggtggcatcattcatcctcccagcctcaatttagagggtccccctagtatagggctccctgatccctaggaaggagtccctaagaagacaaagccgaattcttgtcaaaaagatctttagccccatttttttttcctgttggatttttaaagtttttttaaacattgtggtaaaacatatatcacttataccattttaacgatttttaagggtacaattcagtggcattaattacatttcacagtgttgtacaaccatgaccactctgtttctaaaacttttcaccaccccagacagaaacctattaagcaataactttctattctcttcttcccacagcccctggtaatgtctactttctgtctctatgaatttgccttttctagatatttcctgtaagtggaattatacaatatgtgtccttttgtgcctggcttatttcacttagcattgtgtcctcaaggtttatccatgttgtagcatgtgtcataacttaattcttcttaatgctgcgtagaattccgtcctatgtctgtgtcacattttgtgtttcacattttgtgtttccattcactggttgatggacacttcagtttggccatcgtgaataatgctgcaatgaacatgggtgtacaagtattggtttgagtccctgttttcagttcctttggctctatacctaggaatagacttgctatcatatggtaattttaggtttcattttctgaggaatctccaaactgttttccacagtggctgcaccgtgttacagtcccaccagcaatacataagggttccaatagtgccacatcctctccaatgcttatttcctgtgtgtttctgttttaattatagccatcccagtatgatggagtgatagcttcctgtggtttgtttgttttgagacagagtctctatcgcccaggctggagtgcagtggcaagatcctggctcaaggcaacctctgcctcctgggttcaagcgattctcctgcctcagcctcccgagtagctgggatcacatgcctgtttgctaatttttgtgtttttagtagagatggggttttgccatgttggccaggctggtctccaactcctgatctcaagtggtctgcctgcctcggcctcccaaagtgctgggattgtaggcatgaaccatcgtgcctggcccaccttcctgtggttttgatttgcatttgcctgtgcttagggaggcggagcttcgtttcctgtgcttgtttgccaagtatgcctcttctttggaacctggccccatttgatacacccagaagctgaggctctcactccccagcgtgctgtggtatcctgcgtccttctccatttggccccagcccctctaggcttttatcctgccccgcccccaccctcacactcccagcagcctctgcgactcccacatttcccagacatctcctggactctgctgactgtggactgggtggaagaaggggaggcatctgctatgtgtggggcaccaggactccctcagcccacctcgctgagtccctttcctcacatcccgccacgatttctcctactcactcttccaggccagacagcagccactctgggctccccgagaaccattccatgtcccagcattgagctcctcatagtggatggtaactgtgagctccattgtcagggtcttttccaagagcaggagctgtgttcactcccttcccaggggccctcagcaaggagccctgggtcaggcaggtgctccttgcattttctttgatcctcactctgccacatctctgacattggtttgggagagggagaagggatgggagaacactgacccttgctgacatgtattgggcacttactatgtcccaggccatgctaagccctttgctggcattgtctgtctcaacttcacagtaattccacaaagtaggcacctttgttatcttcttcttcttttttttttttttttttgagatggagtctcgttctgtcacccagattggagtgcagtggtgtgatctccactcactgcaacctccacctcccagcttcaagcggttctcctgcctcaacctgccaagtagctgggattacagacacctgccatcatgcctggctaatttttgtatttttgtggagatggggtttcaccatgttggccaggctggtctcgaactcctgacctcaggtgattcactcacctgagcctcccaaagtgctgggattacaggtgtgaaccaccgcgcctggcctgttatctcctttttttgcagaaagactgaactcacaggtgggcccaaggggcctgttttccagccccaccctcccatctgtttgttttgttttgtttgtttgtttgtttgtttgttgagatggagtctcactctgtcgcccaggctggggtgcagtggtgtgatcttggctcactgcaacctccgcctccaaggttcaagcaattctcctgcctcagcctcccgagtggctgggattacaggtgcgcaccaccatgcccagctaatttttgtatttttggtagagacgggtttcaccatgttggccaggctggtctggaactcctgatctcaagtcatccgcctgcctcagcctcccaaagtgctgggattataggtgtgagccactgtgcccggcccctgccctcctatctttgatggacactcttgggccctcccaagccttcccttctggattttcataccatttcatcccacatcttgcccccaagttgggtaggggtgatgaacagaaaataacatctgcccccttacccaagcataggccttaggtagcccaagctcctccacaagagtgtgtgactcctctatgtggtaaggaaagggtgagggattcttctccctctgctacagatgaaggaatggagacttggagacattaagcaacttgtctaatgttacacagacagcggggatggagatagggcttagtctcagatcttctgctctcaaatccagagctctttgctttaatcaagttgcctccttagaagcagagctggtttcatccacctgtagcaggcatttacaaacacaaccccaaccttagtcaaccttaggttgactttcctccgcccctaagttttctcacccctaaagtgggaatcaagaaacctacctcccccagttgctatgagaggttataaggaatgagaagcacctagctcagtgcccggcacatggaaggtgctccataaattactttcccttcgctcttttagcacaatctctccccacttttcttgggggtctgccatggtgggaaatgagaatttctggttggggaggtagtcgaccgcgtttgaagtgacagtgacagatgggagggtggctctcccaggcgcctggccagccccacggtgcgtgtccaccagtccccggacattccctccctcttcctggcccacgatgaggtgtcatttgccgcctgtcccttctcgtcatcgatttctaagtcgttaattaacggggcttgtcagctgggaagatgaattctgtcctcggctctcggggtcttttgttttgggattgtaaatgttatagatctcccatgatggaaggccatgaggtcagggggtgctgggctgcccagtggcggtggcaggcagtgagaggagcttgtgggcctggctggatctcgctagtctgggacaggcccccaggagccttcacagcagcctctattggcttggctccctggggatggggtgggagggagaggggagttttcctgccatctaaagctttcttctgtgagaagctgccctgtgccaaatggtatagattcagccatgcccaggatggggactggctggaggggatatagactctactcagtttgatgggggagatagcattatcctcagggattagctagtctgatgggggagacagtgttatccttgggtaataaccggtctgatgaaggagtcatagctctggcttgggagagcccttagtctaataggggagaccgaattcctgttttaggagaacccataatcagatgggagaggtacaagtctgccttgggaacccctagtctgatggaaaaaaatgagaccctgtccttgggcacttataggcattgagaaaataagatattttcaggcaaaagttcactcataacttgacttaagtggatttgggtcctctatgtcctgatacctgaggcaaaccactccctgagccagcgggtcccctacgctgagggaatccaggccatccctcggcctctcatgcaagataagatctcagggaagggaaatgatttcaccatcagctgagctgagtttcaggagggtaaaactgatgcctaagaacaaggattgatataaaaatgaaaaattgtatacttggcttttgatgacttgaactgcaaatgggtatgtgttacgggaagagcttacagaacactgacaaatagccatggagtggccacatacatgaaggagaactggcttctctatgcaaagggaagctgggggtggggaggggaggacatgctgtcagttttctgggtgctgagagccactctgtcctgcggctgagtagggtctggctgcacgtggactagaatccaggataggccctcaggaaacctggtttgggcatcaagattgcttctatcttgctgtgcaaacttggggatttttttccctgtctctgggtctctgtattgcaaaaggagtagatcaaaggtgtgggccccccacctccaactctcagaagcagcatgggtggagctcaggcttccatgccaccagggatttgagtttggttgtgatctattgctttggccaagtagctcaacccgtttgaacttcatttctttatctatacattggagatgacagcagcacacagtttttaaggttgttgtgatattgtgggtaaagtgcgtacagcagggccaggctcagtatgtgtggctgtcgttgttattatttaggagaacccacaatcagatggcagagatacagctctgccttgggaacccctcagtctgatggaaaaagacagaccctatcctagggagtttggacattgagagaataagatatttgcaggcaaaaatccatgcataacttggctgaagtacatttggatcctctgtgtcctggtactgatgacattactagtaaacaagggccttagagaacccttggctcacagggaccagcaggcccagtgtgctgccccgagccctgtggctggaggaactgctttcagctcactgaacgtttacaggaacttcaggtcttgtccccccaacctcggtcattttatcacccagtcctgtttctgatccctgggaccctgatctagggagtaaccttgatgcctacctgctgctggaggtgggcagaagagatgtgcccccagcccggacctctcagaagcggcctggctcccaggttcctgccggagctggagaaaacctagcctggtttgggcaatggttcctggggaggggggtggcctcagccttggggtaagtctgggagggaacaaggaggcagaggcaaagtcttgctgctgctggtggtaggaggccttccaggagcctatgctttcaggctgaggtggggagggggcctttgctgtgggacagccccaggagggacagggacactgtgtcagccaccacccaccccctctgccttatgaatgaatgggtctaggatagcaggccccattcttggcctcctccagaagtggggagtaggagaggggaagcctaacatgactcgaatgcagggtgctgcttgtggagccagaaaatgcgtgccagccctggatgtgaagtcaagtccaggggcacaggtgtggagaggtgcccccttaggttcctcctaaacccttaggtgccacctgacccaagcccccattttacagatgaaggaactgacacctggaaagggccagacatttacccagagccgggaccagaatccagacttctgggctcgtagcccagggctctttccccatcaccacgtggtggaataaggccaggactccacagcctcctttctgtgcaatctgggtccccatggccattttggtcatcccccaatgtcccattggacaaaactggaggttaaggcgagtggctgtggaatgagccgctgtgggaggtgcagcttcctggcttccccttccggaggtctcagggttcagggaagccacggtgtggtgggcagggtgatggggactgtagcagaggatgcccgctgggaggcagaagagccctgcctgggggcaggggatgaggggtgttggtgaacgtctggggtccccgccccaggcctggggtgagacgactcctccgtgcgggctgcaggtgcctgctttcctcctgcagaggtggccaccgaggctcctgctataaatcatgagctaaggggctggaatcagggaggaggagctgggcggggcgctgttggggaaatttacagtggtgattttcttctccagactgggagctgagggagctgtagtaactctgccatggctccttgtccgtatcacccatgcccccctccggaggctccattgacctcacaggagcaggggtgaggttagcacagggaggatgcaggagagacttcagccagaaggtcccagacactgggatggtctgagtatacagaaatgggtgagtgctggaggcagcaatgtgcagaggcaggggtgaatgggatagactatggggtaccacttagccatttaacaaatagcaggtgccttgcatgtgccagctttgcctgtgccaggtgctgccaagcatgacagatgtgagccaaaccctctggagcccaggggcaagatggactttaatggaataaactggaaacacatcctccctggggatggtgagcctccttgctgattccttatggccagagggaatctggaggaatcactgccctccagtgtctgggccaggtctgaggcccgggagctgccttcctggcccacgctgacctccattgaggtcttaattacagctgcctttcccattccggcctctcatggtgacatcttcatacggctctgggaccatcgagtttcctgatctcttctcctggtctcttccaacccagtctcaggggtcccagctttctctaaggtaaagcctggccctgtctggacatggagaaagccctatccccctctcctccccgacttctcagaatacccaggtttccagggcaagggctcaggaaagatgctactggagcaacagaggtgaggggagaaggaaaaggggcagaggcacctctgtggcactcagagaataatttgagatgccgaacaaagattccagacccagaggtagcctggggaggaagaaagagtgccacagacatctggaggcctgattcgtggcttggcaacctatcagctagctgtgtaaccttgggcaagtcacagagcctcagtttcttatctgtaaaatggggttaaaaacagccaacattgtggccaggtgccgtgactcaggcctgtaatcccagcactttgggaggccaaggcaggaggattacttgagctcaggagtttgaggccagcctgggcaacatcgtgagacccctgtctctacaaaaaatgtaaaaaagaattagctggatctggtggtgcatgcctatagtctcagcttccagggaggctgaggtaggaggatcacttgatccaggggtgtggaggctgcagagagccgagattgtgccattgcattccagcctgggtgacagagtgagaccttgtctctataaaaaagataaaaaaggccaggtgcggtggctcatgcctgtgatcccagcactttgggaggccaaggaaggcggatcgcttaaggtcaggagtttgagaccagcctgaccaacatggtgaaaccccttctctactgaaaatacaaaaatttcccggtcatggtaaagcaaacctgtaatcccagctactctggaggctggatcgcttgaacctgggaggcggaggttgcagccagccaagattgtgccactgcactccagtctggatgacagagtgagactgtgtctcaaaaaagttaaaaaaaaaattagctgggcatgatggcacatgtctatagtcccatctacttggaaggctgagacaggaggatcacttgagcccaggagtttgaggctgcagtgagctgtgattgtgccactgtactccagctggatgacagagtgagaccctgtctaagaaacaaacaaacaaacaaaaaaactcccaacattgccttccatgagagttaaatagaatagtttgtaaatcaaaaggtatacttatgcaagcaaaataaggggacaagattaaataacaataattaaactttattaagcaagcacctattctgagccagacatcgccttactgaaagctcacagtaacccagcaggcagacattgttagtctcacatcttataagcaaagaaaccttggtgcagagaaggtatgcaatttgccactgtctcacaagtactgacagagggggatggaggctcaaacatctgtcttcaaagccttaatctcacccaagtcaagcgggtggactggtggttgaggtgtggccaaggagggtaagaactagaacttttgcctctcttcccttccccttccccttccccttccccttcaaccttcccctcccttcccctccctttccttcctctttctctctctttcttttttatttggcagggtcttgatctgtcacccaggttggagtgcagtggcacaatcacagctcactgtaaccttgaattcctgggctcaagtgatcatctggcttcagcctcccaaactgctgggactacaggtgtgagccactatgcctggccagagctttttttcagacatcttctatctacttttactaggtaatgttctcacatagtacaaaattcaaaaggtgcaaatgggtcagagtggagagtacatcttgcttcttttattgtatagccttccagagagaacttatctatgcctagtaggcatatatgtgtttatatatttatatacatatttagatatttagattggtagatgatagatcatttaaatttttttttgcaaaaacaggtccatactagctgcacttatttctaggaagcactttccatcagccagaggtgagctccctgtgacaggaggcgtttagagagaggttgagtaactgcctggggtgttgcagaagggaacccaccattggaagggctggtctgtgcttctagccgagtggttcctgaatcctctctgtcgctatgctttgcagagatagaaatgaggtgtggggaggtaaaaaggaagtgacctgtcccacagtgaatctgcagaaaagccagtgaagaccaggtggatgaaaatgaggctggggccatgcccatggggagatgttggacgatgcttgagtgcaagatggcagcaggccgggagaggcccagaagagaactcaccacgccgtgggggtgagtagcgggagggacagcagcatgtgcatcccccaaaggcctccagtttgtttgtaaagtctcaggcaggaatctgcccttgtgatcctgaggcctcatgtttcagggctcaaagctggccctggggacaggaggtggcaactggtgtctgaccccctaaacctggtgcctccactgatcaacagaccagataagggacaggtcaccccctgaccttagggccttgaggcccagggcggggagtgggtggtggtgctgcagttagaggatcccattctcaggacagtaaaccctcgaaagaacttctcacccactattttccaagctttagtcacttgcattctgctttcataatgttgaccatttccaagttcccttgtatttttaaacttaaaataaagtgcatgtatcttaaatgtacagtttcatcagttttcacttgcgtattcacccgtgcagtcggccccatcacaatacgaaatattttcagcacccagaagcctccctcatagcccctcccactcagtgccccccaaaagtaaccatagattagttttatgtgtttgaacttccgataaattgactcaaccagaaggtcctcttctttgtcatgcttccctcattcaacatcatatctgtgagcttcacccatgttgttgggcaaggcgatagtttttcctcattcatgctgcctagtactcagtggtatgagtacaccacaatgtatttatccattctcctgttggtagacatttgaattatttctggtttgaggctattaaaaacagtgccactgtggacagtcctgttcatgtattttggtggacacatgaccacatttctgttgggcacacattttgatgaatggtccacaattataatatcacacagaatagtttcactgccttaaaaatcccctgttcatccctctccccacctctccaaacccctagccgctactgatctttttactatctcaatagttttgctttttgcaaaatgccatataattggaatatagcatgtggtcttttagactggcttctttcacttaacaatatcatcttagtttgcctaccatgccctaccatgtcctctctaccctaccctacatgtcctctcatagcttggtagctcctttctttttaacaccaaataatattccattgtgtggacttacaacagtttgtttatccattcacctattgaaggacatcttgtctagctccaagttttggcaattaagaataaagctgctataaacatttgtgtgcagttttttttgtgaggacataaggtttcaactgagttgggtaaatacctaggagtgcaattactagatcatatggtgagattatgtttccctttgtaagaaactaccaaactgtattccaaagtggccataccattccacattcccaccagcagtgaacaagagttgttgctctccctccttgccggcatttagtgttgttggtatttggggttttagacattctaatagcggtgcgccatctcattgttgttttaatttgcagttccttaatgacatggggtgtcaagcatcttttcatatgcttatttgccatctggatatcttctctgaagaggtaactgttcaaatctttcgcccactttttaattgggttgtttgttttcttattgttgagttttaagagttcattgtacattttggaaacaagccctttatcagataagtgttttgcaagcactttctcccagtctgtggcttgtctgttcattctcttaaaatatactgtattcacgttaaaatgaaacttcatatcacaatggtaatggggaaagcagaatactttgccatgaaagaaggtaaccataaaaatttaaaaataaagtgcccaatgtttcaagttcttctcctctgacaaaaaaaaaagcccagtgttattccatcctggctgagtcctgccacctgcttctgagctctaagcctgaggcttaatgtctattgttaaaaaagaactaacaagtggcgaagaggtatgcaagctgtaccagcctcaaaccaagaccttctgctaatcaaaatcagaaagcttgaaaaataatttaaggagtaactttttttccgtgtaagcaatcttattgaatgctggtcaacgtagcacctgaaagaaactttgggaatcactgatctagtccactccctcgcccttgcctctacctcactgctaaaatcctttgatctttcacccagtgtgtgtgcacctccagtgaccaggaaatcacccctttccaagacagcctgtctctccagaggaagttctagtaggaagttctttattgcatcaagccaagtttccctgcatcctcccctacttgtcctacctccccactttggggaatcccagggtcaaggctcatctgtttgttccaaagagtcattaaccttttacagcctcagtttcttcatctaaaaaaatgggggataataatacccactttccagggagatctttgtgatgaaacgagatacagcatgtaaggtgctcagccccatgcctgcttcccagaggggtgagaaaaaaggaggccttttgttgattcaactgtgaacttgcccacaggaggaagtggacatgggtctgcaccattttttctgggtgatgtctcagcattgttgagaggggccaagatttgaaagtctaggaaggaactgggtctatgttctgatggacccctagggataatctgatccaagctcttcatttcatagcttaagaatctggaggttagaggggctgagagatgtgtccaaagtcacagagcaaaaagcacaaaggcagagcagagacctgtggggcaggcagtggtttcttagggctgaaaggagcaccagacctggagtcccgagccctagctatgggccatgcagctattaatatatagataccgtactatgtggccttgggcaagtattttttcctctctaggcctcagtttcttcacttataaaatgaatcgttgacctaaatatgttttttgtttgttttatagagacagagtcttgctatgttgcccaggctggtcttgaacgcctggccttgagcattcctcctgcctctgcctcccaacgtgctgggattacaagcatgagtcactgcacccaactgacctaaatgtttttgaggctgtttctgcttctgaaattctatgatcaaggaggtagttcttgagcttgaggaaagtgtgggaccaattcatccgaagacaaaggcattccaggcagaagacacagcacaagcaaaggctgggaagtaactggattagactgggcatctgggcgatgagaccctagggcgttttaagcgtacagaaaagtacttagcatggtatctgactcaataaattctctttccctgagtaaaatttcccacttccacatctctacttcatccattaaatggaggataatgtttgtggtggacttgctgaacccaagtattgaagtcatagcccagcacaaggctgcccagctaggaactagatttcccagccccagacaggaacagacacttttcaaaagaagacatacacatagccaacaagcatacaaaaaaatactcaacatcactagtcattagagaattgcaaatctaaaccacaatgagataccatctcacaccagtcagatggctattattaaaagtcaaaaagtaagagatgctggcaaggttgtggagaaaaggaaacagttatacacagctggtgggaatgtaaatttagttcagccattgtggaaagcagtttagcgatttctcaaagaagttaaaacagaatttccattcaacccagcaatcccattatgaagtatacacccaaaggaaaataaatcattctatcacaaagacacatgcacacatatgtttattctaacactattcacaatagcaaagacatggaatcaacctaaacgaccatcaacattagactggataaagaaaatatagaccaggcacagtggctcacctgtaataccagcactttggaggccgaggcgggcagatcacttgaggtcaagagttcgagaccagcctgaccaacatgacaaaacccgtctctactaaaaatacagaaaaattagctgggtgtggcagcggatgcctgtagttccagctactcgggaggctgaggcatgagaattgcttgagcccgggaggcagaggttgccgtgagccaagatcacaccactgcactccagcctggtacatatacaccatggaatactactcagccataaaaaagaaagagatcatgtcctttgcagcaacatggatggagctggaggccattatcctaagtgaactaacgcaggagcagaaaaccaaatactgcatgttctcacttgtaagagggagctaaacattgcatagatatgaacacaaagaagggaacgacagacaccggggcctgctggagggtggaggttgggaagagggagaggactgaaaaaccctccatcaggtactatgtttattacctggggatgaaataatctgtacaccacactcacgtgacatgcaatttacctggataacaaacctgcacatgtactcctgaacctaaaagtcaaaattacataaataaataaatgttccggcccctttatggctcagggtggccacatgacaaagtcctcaccaatggaatgggagcagaagtgatgtgttgcaacttccaggcctggcttttaagacacaactcatgcgcacttttgattctttctgaagacatgacgtgggcaggccagtgtgaccgtgtagacaagagcatcaccaaggggtaataggggaaacctcatggagggagccaggctcttgtttggttgtgtggggtggagcagccctcctacccaccctgttacatgagaacaaggaaacctttctgttctttcagccagtggacgctttcttacagcagctcagccttttgccataacgaacacaatgtctctatgtgggtaggggcagaggggaaaatcaagtgactcctcaatgtcgagttttgagggtttctgagggctagcttgccgttcctctcacaagaagctctgtctttcaccattctccctgggtgatggctatcagcccattaaaatgcatggaaggtccctattttaaaaaaaggaaaaggaaggaaagaaggaagagaggaagggagggagaaagggagaaaggtaagggaaggcaagcataaagccaaagaaagatccctagggtcacagagctgtaggaagtcttagcgatgaccttgtccacctccaaccctcccagttacctcccccatcccccctttttttgtatttttttttagtagagatggggtttcaccatgttggccaggctggtctcgaactcctgacctcaagtgatccacccaccttggcctcccaaagtgctgggattgcaaccgtgagccgtcgtgcctggccctcaccctgccctttttatagaagaggaaaacaagtctcagagaggtattgtcataacataaacaaaatgtttgggggttggggaaacaagaaggtgagggcgtgtgtgctgttgtccatggtcctgaaacttctcacactacaagtcattatttttctctctctgggaccttgatgattcctgtttgttctcttccaggaattctgaatcaaggaagaggagagggggtcgtggggcagaagagaggtcactgacagagaggggcacaggggcagaagctgtccagaggcatagctgtgacaagttgtcagggagaagaagagagacttttgttttgacatagttttcaaacaatggtggttgcctggaaagaaaccaaccactctacaactatagcctaaatactaaatgactgaggaagaataagaaacgtgtgtctcaaatgatacaaagctgtgcatgtgtcaacatgagcaaactaattcagatgggcacgtagaacacaaatgggaggggggatggggttgactgtatttattctttgtttttcttttcttgcctgatgaaatatttgtaatttttacactgtcagaaagcaatcaaaactgtgattatggttcacaattttgacagctagtttcgtgtactttaagtagttctattgtgttttagacaatttgaacaatttgcttttcccttgaaagttgaggaaagactgcacatgcctttaattcccactaaacctgtgtggagagcaaaccatacagctggcatttgttgaactctgctctaagcaagcatgttgtgcttaagaactcatttattccccataacaaacccaggtagataggtagataggtgccatcatagtagatgaggaaatggcgtgtcaaagtagtagatacctggtccaaggcagcctggctccacatcctgtattttcagcccctggctagtccaattcttggtatcttactgggccacagcagaaccagacataggcttcctggttcccagggtagaccctttccttcctaccatcttcatgcagtacatctcagaactggggtgtgtttaccaaaggggtatgtagtgctaaggagttgcacagatctgcacagactgaggcacaggactggtcttagagggaaaaccacagggaggaaagagtgggtttctcctgagacctgagctccagccccacttcatggcccagagagctccggccagggaggaatatccaatttccaggcatggttgaaaccggagctgggtgcccccaccagcttgcctcctgtgttcctcctccatgtgtgctgaagtggaataggcggagggcacaaggggaagcattgttcctgcccccaccttgtgcaacccagctctcagtggagcgtggaggaatttgtgtaactttcctggaggttaagagcaggtcagtgcagggctgcagcccaggctactctcccagcaaagggagcctcgggctaagccaggcggccccgtgggaacagaagcacatacctgctgtccatgccctgaaacgggagggcagcctgagctgctgggcgtgaagatgcagatcccaaatcccccagctgccctcctccagcacaggggcagatcacagaagcctgaactgacaaggaacctggaaacaggcaaccaaattcccacatctgccaggtgggcacactcaggctcagagaagaaagaggagctttcatgaatcatgtaccttcctgagtgccattcattcattcattcattcactcatcattcattcattcatttagcaaacacttgtggtggaatgtcaagggcagacactatcactatcctagaaggttcgatgtatttcttattctggttggcattcgggagagacaatagagactcaaagagggcatgagatctttccaaggtcacacagctggtttgaggcaggtctgctaagtgtcagcctaagcctctttcccctgcaccaaacatgcaagcatgtatatatggtgtatggaaagtcagacggaaaagtgggtcctaagtcattggatcaactctcttgtctcctggcaaatgatatgacagagtcaattccactcaacaattgatttggtgtctactctgggcaaaatacttaattgattctcttcttctgggaagatttccaggaaccaactaggctcctgcattgggaagttagtcctgatcaaatctttcctcctttaatttaagccattttcccatttgtcatacacaggatgtgaagatagcttgtgtttcaagcaaagttcttcatcatcacaggaaggcaaaaggttggaatggaccatgaatgtggcaggtgttttcacactctggcacctataaagagtcagagcccaacagagattggtgggatgaatgaatgtacacaaaattcaacatttaaatggcactccaaaggtttacagaagatgttcatgtacactctttcagtccacaaagcaatcctggaaggcaggcactttatccccatgtcacagatgggaaaactgaggctcagaaagcataaataggttgctgagggtcacagagctcatgggcagccatgttgagatccatacctagacctcctaactcctagtccagcgctgcttctgtgacgccacatggctgaggtacatgtatgtggttctagtgggcagtattaatataatgacagtggcagctgtgtttctctggcctttctgcagggagggaaatgctcagctggtctgaaagccatttcttcctacccttgagtggggggtggaagtagaggagggacatctatctggccagatgtgttgggagggagggtgagtccatggcttgggttaatgatccttgccacccacatcactgggtggtgggaacaggtggccaagactgagctgaccagtgggactaggctgagctaggaggcaccagctgctgtccagataaagatgacctttcttagccacagctcccccagggagagagatatggagtatctcatccatggtctccaccttagtgcagacccctatcagtgctcaaccagaccattacaactgcctcgcaaactgcctctgtacctaacttcatccagtcccatgccagcttcacactgctggcagagctgtgtttatatggcacaaatgtgttggtgtcacttatcttcagagaagccttcaatcctctccccgctggtacacagcctaaactcccaagcaggcgctcactatttgtccccaacctaccctcctaaatctgaccacaaaactccccttcaagcccccatacctcaaagacgtttcccacctcgactccattgttcttgctgttgcctttgcctgggatggtcaggtacagtgacttgtgcctgtaatcccagcattttgaaggctgaggtgggaggatcacatgaggccaggagttcgagaccagcctgagaaacagagcaaggccttgtctctattttaaaaaatgaaatattgccgctgggcatggtggctcacacctgtaatcccagcgctttgggaggccaaggtgggcagatcacctgaggtcaggagtttgagaccagcctggccaacatggcaaaaccctgtctctactaataatatgataattagctaggcgtggtggcatgcacttgtaatcccagctactcaggaggctgaggcaggagaatcacttgaacccgggagacagagatttcagtgagccgagatcgtgccattgcactgcagcctgggcaacaagagtgaaaatgaaactccatctcaggggtcgggggagaagattgcccttgcctgggatgcctacctcacaccctgttggtctctgacactgatccctccttcgtctcaacttgcaactcagttttcctcttgtgacatttgcccccttcttaccttgtgtttctgtgccttttatctcctgccctagaccaggagctccttgagtatctcatttagttccccctgcccccctgcatggcacttactcatggaaggggcttaggagcatacagtgggcatgggaaggggctgggaagagggaaggcaggagggggcatgctctcagtccaggatccagagccaagctgagctgaattcaaatcctgactccaccactcattagccgtgtgactttgggcaagttgctttaacatctgtgcctcagtttcctcatctgtcaaatagggataatcatttgcttcatgggactctttgaggattaaatgaggtaacagattaaaacattcagcgcaaagtctggcacatagtatgtattcaataaatgttagatattatttataatttagttacataaatgggctagatgagatttcattgtcatgagaatttcaaatggagagtgagaactaacatttatttcttattttatttttttgaaaccaggtctcacctgtcacccaggctgaagtacagtggtgcaatcacagctcactgcagcctctaattcctgggctcaagcaatcctcctgtctcagcctcccgagcagctgggactacaggcatgtgccaccatagccggctagttaaaacatttttttttttttttgtagagacagaggtcttgctatgttgcccaggctgttcacaaactcctggcgtcaagccatccacctgtctttgcctcccaaagcactgagtttacagaagtgagccaccatgcctggctccatgaagaactaacatttattgagcacccgctctgttccaggcagggcgctcagcatctccatgtgcttctccttattcagtcctcacaaggatgccaggaggtaggcatcattcccatttttcatctgaagaatctgaggcccagggaggtttgcgtggtgggcctttggacacagatgggaaatggtgggactgagggtcaacccagatctgtgtgactccatctctgtgctctctttccattcaacctgaccgactcaggaattcagagggagatccctaggaagtggtccctagaaggaggcacacctccatctcctcacaggccagctcccctacccagtccctcacaaggcccagctctccagggagtaggggcgctggtgctgaagttgaggggggattaccggtgttgggggcctttcccgacttcccatggatcctctcctcttcctctcctgcagcagctgagccagggctgtctcttgggttcagtccggttggctccaggccaattccaggtgtcacatcaggccttggctttcagaaggctgcagggggttcctccaggaagggcagtgtgcttcctccagggtccaccatggaggtgccgctgtgccacttgggaaagcaggagctccggggagcctaacccaccgattctgggatcctggccttggcacccctcagctggtctcaggcaagatacttcagggcaaagggactcagtttccccacatgcaaaaggggaataatctctattccccagcttgccatgagcattagttaagattgcggacttaaagctccaggcctggtgcttactagatgctcagtaaacactagtttcctgcttcctccacatcctccccctctcccttgggactgtcctttgagggccttctcttatgtttttcaggagatctgcttgaaaatgtccacctactccacccaggacagcagaaactactcggggaggctgtactgggccccttcttccagctgaggtcctggtcactttagtctctccctctaggtgtggggtggagggaggactttgccctgcctccagccctggggccttgttccttctgacttgatactatagctgctgggatcagaggtgactgggagactggtttggtcaagaaggagggtaaagagtagtgcctagcctgcctagaccactttcccatccccagagggtgccatttaactcccgctgcaggtgccatgagccccggaccctgcactggcttggggagagggtgcactgggccccaatttttcttatctcttggccaaattccaggcattcccactgtgaatcccaggaactgaacttatccttgcctctctcgggtccagggattagcatcccctctcccgacccctgatgatacacctcagggaggcctggtccggacctagtcagctgcttcatcagctctgtgctctggagctcctgtaagggtgacatgcttctccatgctttacagatggataacctgaagcacagagacatcaaacaggccacacagctagaagtgccaggaccagagcccaagtttatccagctccaaggcacatggtctttctcccatacccacttacctccctgcctcctagtctgaagcggaaacactcaacaaagaaagctccctcaccacctaattgatgtggcattggaaacagccttgttcttcctcacttagaatagactccctttgctccattccagagaggggagaagaagcaatgaactgcctgggggaggcagttctgcagaaagaatctgaaggccactgtggaaggaattggccacggaagctgcatgatgacaacagtgctgggcttgtcctgacctggcctcactccggccaatttttcctaatcaacatggccctggggagggagcagcctgcctggaataggaatgaagaaagacagattaggggtcactctcctggctttaacttgcatgggcttgctgggttcctttagatccctgcatgaaccattcaatgcaaaccatacatgtctgttaggactcttggttgcaagtgacagaaaaccttcctcagcttcagaaagcggggagggtttattgattctcataatggaatagttcaggggtaggtctggcttcgggtaaagtttgatacagggcccaaatgacatcaccagaatccatctctcagctcagttgcttgtgtttatctctattcttcagctctgtggctggcagaaatagctgtgccacactaagatacatactcgcctactccagtggaaaagagggaatttcccttcccagaagccccagcatttcactggctgtgattggtttatatgctctggagctctcactatgactggaggtcatgaagattgaataaacttggaggacatgaagattgaataaacccagaacccatccctggggctctgggtggtataatcccaccagatcacctagggaatggagaaggagtagtttcccaaacggaatttgggcttcagtttttagtagagggggcagtgagtgctgggcgatcaacaacaatatccctcccaccccaacaaggagagccccagtccccatttaaatagcccagctctggctccgactcaccctctctgcccctctcctttcatctcatcccatcctgctcctgaacttgcagcttgggctccatcataggacagggtccctagaaacagagtctgagacaaggattagggcacatgtgattaatcaggggtgtggtcccaggagaaagggtatgaaagaagcagaattaggcaagggcagagaggagcgaggatgcagcctcagccagattcagcctgatatcacagggcactctggagcatcagctgtgccagagagttggtccctccttgaggcaagggggccagccttttgcactctcctcccctcatgtcaatcagtcattggttatgggcttcccaggaatgtgtaacctttcagggtaggcagcttccattcagccagtgcaattctccagagatgggggcagctgagagccattacagctaacatgcccagcagcaaggagggtttgggcagaatgtcagctacaggctccttgccttgcccttcagattgaatactcagttccgttgtttccttggcaatggcctgactccctccatgatcccagggctaaatcacctttatatccctctgactgcttagcaatgcctctccaagcttgggggaccctaagggcctcctacccctagcactgctcccaagggtacccctgctcccacagggcccctagagcaggagccaaccagagagagctgccttgcaccgggatggagcctggggctgtcttggacaatggcagagtccctggcctcctggtttcctctgcctcactcctccccagttctgacttttgtctgctactttggcattcagcttcctgggcatctgcctccttctggtgtacatattggagcctcttctcagaatggtcaattctgttggcctttccagttcccccaccctggattcttctctagacagctgatgccctttgacaagaatggtttaagttaagtctcttgccaggtgccaactgcttttgaaggcttagattctgtcttgtttgagggctttgcttattagtttaagagtgccgggctgggcgtggtagctcacgcctgtaatcccagcactttgggaggccaaggcgggtggatcatgaggtcaggagttcaagaccagcctgggcaacatggtgaaacactgtctctactaaaaatgcaaaaattagctgggtgtggtggtgcatgcctatagtcccagctactcaggaggctgaggcaggagaatcgcttgaacctgggaggtggaggttgcagtgagccaagatcacgccactgcactctagcctgggcaacagagaaaaatgtcatctcaaaaaagaaaaaaaaaaaaaaaagagtgcctcccccatacaaacttataggacaaaaaatgtttctaagacatatgagcaacaaaagttaacattctaatatacaaaaagtttttatgaatcaacaataaaatatatgaacactgcagcaacaaaattggtcaaaggacatgaacaggcaatattacacaagaagaaatggatatgagaaggtacttgacctcactagtaatcaaataaattcaaattaaagcagcaatgaggaatcatttgttcacttttcccattggcaaatatttcatgttactgaggatgaggagaaatggccagtcttgtgctttgatggtggggcaacagcagtgtaaagaagtacacttggccgggcgcggtggctcacgcctgtaatcccagcactttgggaggccgaggcgggcggatcacgaggtcaggagatcgagaccatcccggctaaaacggtgaaaccccgtctctactaaaaatacaaaaaattagccgggcgtagtggcgggtgcctgtagtcccagctacttgggaggctgaggcaggagaatggcgtgaacccgggaggcggagcttgcagtgagccgagatcccgccactgcactccagcctgggcgacagagcgagactccgtctcaaaaaaaaaaaaaaaaaaaaaaaaaaaaaaagaagtacacttctgggccgggcacagtgaatcacacctgtaatcccaatactttaggaggcagaggtgggaggatcatttgagcccaggagtttgagaccagcctgggcaacacagtgagaccccatctctacaaaacatttaaaagttaaccaggcatggtagtacatgcctgtaattccagctactcaggaggctgttgtgggaggatcactttagcccaggaggctgaggcttcagtgagccatgattacaccactgtattccagcctgagcaacagagtgagaccctgtctcaaaaagaaagaaaagagagaggaggggaggaaggaacgaaagaaggaaggaaggaaggaaagaaggaaggaaggaagggagggagggaagaaggaaggaaggaagggagggaagaaagaaaagaaggaaagaaaaaaagaagaaaggaaagaaaaatagaagaaagagcaagaaagaagaaagaagaaagaaaggaaagagaaagaaagaagaaaggaaggatggaaggaaggaagaaaggaaggaaggaaaagaacgaagggaaagcaaaggaaggaaagaaggacatttctggaaggcaatgtggaaacccttggcaagcctggaaaatgtgtataaccttagaatctacaattcaacttcttggaatttatcctagggaaacactgaaagatgtgcccaagggtatatgtgcaatgatgtttatctcagtactatttataatagcaaaaaaatggaaatgacttaataacccataaatagagaactggttgaatcaattatgcttcactcatataatgaaatcatatgcagccattaaaaatgatgcctgggccatagtggctcacacctgtaatcccagagctttgggaagctgaagcaggaggatcatttgaggccaggagttcaagaccagcttgggcaatatggtgagaccctgtatctgcaaaaaataaaaatagaaaaattagccaggtgtagtggtacatgcctggagtcccagctcctcaggaggctaaggtgggaggatcgtttgagcccaggagtttgaggctgcagtgagctatgattgcaccactgcactccagcctgggcaatagagcaagaccctgtctcaaaaaaacaaacaaaaaagacgtatgtatccgttgacatcaacagagccccataatccattaaattttaaaaaggttataaaagatcatgtagagtatgcttcatttgtgttgaattgtatacctaagtgggtactcccaggaaggagtctggaagagtagtctccaaaatttctaggtggtaggaagtggattctgtggtttgtgccttctataggtaaccagtgcccagtgaccatctgggtgtgccccgtggtcccagttctcattctgatggagccgacttgccctgggattgggatgactgactgtgcccttggatacgctcaaggggatggaccaggggacatcagcatggattattctagagatcctgagaaagactgttgcatagcaaagctctctaaaacgtacatggtgtaaaacaataaccattttataaccaattctgttgtcaggaatttggagaaggcacaactggaatgccttatctctgccccatgatatccagggcctcagctgggaagttacaacttccagctacagatgacttgaccaggaatcagctggagagctcttcagacctggagtcactggaaggctgggcttagctggagctgtcaactggagcacctacacgcgggctgaatgtagcttggacttctgacagcttgtcatccggttcccaggggtggcgtctttaagagggaagactctggagggtattttaagaggccaaagcaaaaggggcaaggcttctgacttagcctcagaaaccatgtcagcaccactttgccacattctcttggttgcaaatgagtcactaaagccagctcagatgcaagaggaggggaattagaccccacctcttgatggggaagttacaaggtcacattgcagaagagcatgtaagatggagatagcatgtggccttctacagaaaagacaatctgtcatagacagttttttttccctgctggacccaaagcttcgagatgtgagatttggaacagctgtagctgccctggaatcacgaaggggaagcctgcctataaaaccagcatggaggagagccaagggatgccagagagtgagagcgagacagtgtgagagagagagcagatccagagggcatcatttgagcctgaccatgcttctttgtcccaagagccaataatccccttacacttcagctagtttgagctgttttctaccacgggtagaagaaatagttctaatcaatacaagaggattttaagaggattttactacctttttatactttttcatttaaaactttttttaattctttctttttctttctttcttttttctttctctctttctgtctctctttctctctctttctttctttctttctttctttctttctttctttcagacagtcttactctgttgaccaggcttgagtacagtggcataaccaattatagctcactgtagcctcaaactcagggctcaggtgatcctccaacctcagcctcccaagtagctaggactacaggtgcatgccatcacacccagctaatttttattttattttttctagagaccagggtctcactatgttgtccaggctggtcttgaactcttgacctcaagtgatcctctggcctcggcctctcaaagtgctagattacaggcatgagccactgaacctgacctacttttccatattgcttgaattttccattataagtatgttatattttcagtgttacaaaaaattttttttgagacagagtcttgccctgtcactcaggctggagtgcagcagcacaatctcagctcacagcagccttgacctctcaggctcaagccatccttgcacctcagcctcctgagtagctgggaccacaggcatgcactaccaaggctggctaatttttaaattttttgttgagatggagtctcactatgttgtccaggctggtcttgaattcctgggctcaaacaatcctcccatctcaacctcccaaaaaagtgttgagtggcatgagccactggacctggcaaacattttaattgagcagctatttgtgagtcacagatggcaaacaccctgactttaatcacctcacattttgatcgatctgaaaagtaaatactttgcctaccattgtcttttgttaaagcgcagcacctcctgctcccatgccaccacccctcaccacttcctaagttttctctaagattcaagcactttccaaatattccattcagtacacagttatctggtgtgatggcctctgcacagcatggctcctggccttcagagccctcaatctaggcaggagacagaagtgaacagaatcgttctgatcaagggctgtaagtactagaacggaagaacagtgtgctgtgggaagaaatggagaaagaaaggagaattcctactaaaatggaggcgaaggaggcatttcaggtagaggaactagcttgagcaaaggccaggtagtagagccacacaggatgtatgatttgtgtggttagcatgatgcaaaacaggtgactacagggtggccttgaatgctggtataagacgtttttgctttatcctagagagaatgaggagccactggagggatccaaacagagaagtgtcatgatctgatgtgaggtgggatggtcaacctgatggtggtgtagacagtggatgggagagacccaaggccaggtaggtggctactgcaatagtccaagcagtcagtactgagtcctacatagccttgtgcccttgtagttactctgtctaagcctcatctgggagcaggcattctctgctgtctatgcccagggcctgtgcttgaggagagaggtcattctggtcttctccagagccatgctctgaccttggtcagcggccttgtcctgccagagccccatttatttggcttccccgctacacccaggtcgtggttctacttagggtgtgtgggaagtagtagctgtctccctccaccctcattcagtcagcttgactgaggaatctccagattggaagcaagtcttcaaatattaacagctaaaaagaataaaaacaagaacagccacatgtatgacaagacagtatcaacactttgcatggattatcccatgtgatactcttggcaaccttatgaggtggatgccattgccgtgtccatttcacagatgagaaaatggagtctctgagtcgttcatgcaatggctgctcactctggggcctccaataaggcatagcctagagtccacaccacaggctggatgaggtccttggtctctacagcctggaatgcagtggccctctttctactgctgcttatttgtccaagctcaacaaaggtgtcccctcctctagtgatcccaaccccccgccccccgcaaacccttgttgccacttcaggtttccccactccctgctctcctctgccccagcatgcatccatctggctgccctgccatggtttgctcatctgtcctagagggtgagctccccaaggacaagcagacagatctcactctccctgtggtcccgtgccagcacagagaggctctcactgaaggcatcagatgttgaagtagaaggagggggcgccctgctgccctccctgctttggggctttccacctttccagaggaatgggctgcctccccagcctccctctgaaacttgcccccacccctgtgtgggagactgagaggggctttcccaagctgtgtgtcccctgccgttgagatcacatccccaccttctgtcttttcttttccaaataagcatccaaattcaaaggctgtgataagctctagctaaaggctggaaaccagctcaggctcacataccagggtgtccaacccatgcccaaccaggaaaaaagaaggagattgaaggagaaaaagggagagagatggtcaccaagctgaaggcagatgaagaagtgagagagagcaaagtgccttcttgctgggagcctcccttgtgtctggaatgatcagaaatcggggagaaatggtacagccttcagcagacgaaattgagcagttgtgctgtgaggcaggctgtggtacttaaatgcaatagctgatctaatcaccagtctcgttctctgggaagctttttgctgcattttagcacagaaaagtgttgtctttctctcttttgtggctcgagctgctatttaagaaagcaaaaaaaaaaaaatcaatatgccttctcaggctttcattctttttcccccaaaaggtgtttctttggggagggggaaaaggtagaggggggagtcgaggagcgtttttgtcattcataagccatggtgacaaatccttgacatcattcgcggttcctatcgatcagctccgtccgcggcaccagaggacaaatagaaatcatttgtctgtcttggctcccaaacaacctgagacaaagggctcggccagcaatcagcagctggaggtattagcagcgggtcaagttcggagatcagaggtcaaacaggttgtcatcagtttctcacagctatcagagcaagggcaggggaggggcagaataaaacccaccaacaacacagctggttcttattagccaaatcctgccaaccctgcctccctgcaaagaaagatgggccactgcccccccagggacgccctgggatgcaggatttcatgggttggcggcaggggtgtgagaggccaaggaagaaaagaagcaagatctgagctctgcctcttgctgtgtgtcctgagcaccctcccaagggaagctctgagttattctgtcctgggccgtgaaaaagagagagaaagaggagagagagagagacagagaggagaaagagagagagagagacagagaggggaaagagagagagagagacagagagagacagagagagacagagaccgggacctcaggtttctctgggagtcctagcaagcaagttaatcttgtataattggaagtggcttaaatggcctgggaaacaggggatgcagccagggtacagttgagtcatgttaagtccctgattacacatcacctgttttggtttctcctcccaccctcgagatgagacccaattcttaggacaattaatctagacaaagatatggaaggatgagggtggcatatccagcccccgtggagtgacacgtacggcgggtgactggggagtgaggagaagcatgacaaataggatggcatctgacagctcttttcactgagcacttgccatcaaggctgtgggcctgctgcagccgttatctcactgaagcatcaatgagagccctgggaggggcctgttggttccatttcacagatgggaagactgaggcccagagagattagatcaccagtatcattgaggccacaaagcacatatctgaaaagtggatcccagggaacaaagaaaggggcacctttgatgggatccacttttcacttttcaatgagcacaagtccaactgatgggaacatattgagagttctgggtccctgacttcgccagctgctcctttggcacacccccaagcacccaaggactctattgccttataaggatgaaaagacccagaattggaacttgcagctctaaggaagtcccccgcgaagggagagtaaggtaattcaggaggtttggagctcaccaaggtgggaacactttgagcccacactggcccaggctggaaggcaggacttcaccacactaatcaggtggtaaatccagctctcaggagcctactggccctcagataagttaataggaatgatggcttctcttcagtgccactgggtcacggtgaaatgggagggggcaagtttagtgcatgtctgaagacacatgggtggcctgtcacccaaaggcctctgctggaataggggcccttctcaagtctagggggctccaggggacgtaggacacattttaatgaagatgagtagggaattctctgatgcacccgttacttgttccaactctctctctctctctctccctctctctcttttttctaagaggtggggtctcactattttgcccaggctgattttaaactcctgggctcaagtgatcctcctaccctggcctcccaatgtcctgggattacaggcatgagccaccactcccggcctgttccaactctctaaggaacctttaagatgtggaagaaaaagaaagataaaggcagtagtggagctgtgaagattggagtctttgaaggaaacttcaatgatgcatgtaggataaatatccttctgaaacaggagcccttaaacagaactaagacctgtggctgtaaaagggtagcctgaggatctacacatctgcacgtgggataaaactgcatagaactcaacacacacacacaaacacatgtgaatgtaaaactggtgaaacctgaatatggtcaatgggtagtacccgtgtcaatctctggcttgtgccactgtactatagctatgcaagatgtttccactggggaaactggatgaagggtatatgggatctctctgttttacttcttacaactgcatgtgaatttactatgacctcaaaagacaaaagttaaaaaaaggaaaaataaacaaaaaagcattttgttccctcagcagagttctctctgcctcctgacataaagataggaaaaggcacagtcaggagaggaataagtgctctatccacaagctctctccatgtagaaaacagataagaatggtctgcattatgtgtatttttcaccaaatccatccttctgaagaaccacattgtatttatgcacacattattatcccattatttggtgaagaaaactgaggccggggtggtgtacttatttgccggaagccacagtggccgagctggcatttcaatcccagtcagctgactccaaagcctgcgctctttccaccacagcacagtggtcaagttggcagtgttcctatttccagagccccagaaagtatgctctccaagggtagatttggcctaggaagctaaatatgccaattccatcaagcattcgttaaaaattttgccgtccaggagtatggaggggtagttttttgtttgtttgtcaaaaaaaaaaaagaataaaagaggcctgtcctcaaggatctgagtctgtggttttgccaggaaactaacatgcctagagatgggctgaactttcctaagagcaacacagggtcagagaagagggagatgtgtgggaagggggcctcttggaagggggcaactatgcctctttcttttcctttttttttttttcttgctttgagacggagcctcactctgtcaccaaggctggagtgcagtggtatgatctggctcactgcaacctctgcctcccagctcaagtgattctcctgcctcaacctcccaagtagctgggattacaggcgcccaccaccatgcctgctaatttttgtatttttagtagagatggagtttcatcatgttggccaggctgatctcaaactcctgacctcaagtgatctgtctgcctcagcctcccaaagtgctgggattacaggtgtgagccaccactcctggcctctttttcaatttttttgttgtggcaaaattacatgtaacataaaatttaccatcttcaccattttgaagtgtataattcagtgatactaagtaaattcatattaggtaaaaccatcattatcatccacccacagaactcttcatcttcccaaactgcaactttgtatccattaaacaactccccattccccaccctcctcacaggccctggcaactcattctactttctgtctctatgaatttgactactctaagtacctcatatgaatggaatcatacagtatttgtccttttgggacagacttacttcactatcctcaaggctcatccatgttgtagcacgtgtcaggatttccttcctttttcatgctgaatagtattccatcatatgcacctaccacattttgcttatccattcatcttttgatagatacctgcattacttccccgttttagctattgtgactaatgctgccatgaacatgggtgtacaaatattttctatttttctttttttttttcaagatggagctttgttctgtcacccaggctggagtgcagtggtgcgatctcaactcactgcaacctccgcctcccagattcaagccattctcctgcctcagcctcccaagtagctgggactacaggtgcccgccaccatgcacggctaatttttgtgttttgagtagagacggagtttcaccatgttggccaggctggtctctaactcctggcctcaagttgtctgcccacctcggcctcccaaagtgctgggattactggcatgaaccactgcgccctgccacaaatatcttttcaagattctgcgttcaattcttttgagcatatacccagaagcagaattgctgcatcacatgataattctatttttaattttttgaggaaaggggatggctttcacttaaggatcatacagtttggtttcatttttagtttgtttggcttgttctttaaaaaaaaaaagtaatatatgtacataattcacaattcaaaaggtgaaatctccctcccacctctatcctccagtcagtcacccggttcacctccctggagtcaaccaatgttatcagcttcttgcttattcttcaagagagattccaggcatgtacaaatacatctatctattagaagggtttcgataggtggagaagggaagaaagaaagggcaccaaagaggatagacttgtcatggggagattcatcctactagggtaaatttttttctgtcgctgttttaggggtgtctcttataaacatcacatgatttgactttagatttttgactcaatctttaagtctttttttttaatatgtaggttttgtccatttacatttttttctgtatttaactggttttgccttattgatagagggaaataattcctttggcagaaacaaatgacccttagttttacctcctggttgacttttaattttgctttcaaagattctgatcttctaatctttgctgtcccttttacctttcttccctagtgttttggaagaagttttttgttttgtttttgagacagagtctcactgtcacccaggcaggagtgcagtgacatgatcttggctcactgcaacctctgcctcccaggttcaagtgattcttctgcctcagcctcccaagtagctgggagtgcaggcgtgcaccaacatgcttcgttaatttttgtatttctagtagagacaaggtttcaccgtgttggccgggctggccttgaactcctgacctcaagtgatccgcccacctaggcctcttaaagtgttgggattacaggtgtgagccaccatgcccagcctggaataagtttttattccattactggttaactttttaaccagtaagaatattttttaaaaaattctttaacttggaatcatttaacattttattttgagagtcttgagcgctaaagaaataaagaataatacaagcaacacctatattcttaccatttatcattaatgtgccagtaatcaatgtattgcctcttggcaccaaacctgccatcatttgcctgcttcatgttactgcagctggaccctgtaaacacttctcctctacgcacactggttttgtggatagagggctctagaggaacatcacgaggcacagcagaagaatgggcttctcttcctggttcctgagttcaattcctgttcccaggacacagctgccagcagcgtatgggagacccagtggtgcttaccctctggcaatttacactggcacccctgtggttggctttctgcttgccagccctggcctgtcagctgtggcccagctttggcttgaagcacctcggtgaacctctccacatggtccacagccccaccctctctaaggtctgactcccagacatgggttgggggtttctcccaagtgccatggttccttgggtgtgcttcctgagccctagaggtagtaactgccccccatgtctgctacccctctttaaaggtaccttttcccctcttagttggtaaccaccttttattaattttttcagttaattgctttttatattacttttttctgtgtggtttctgtctcctgactggaccttgactgatacatttaacaaagttcatatttttgtcacatatgcttgctgttattttttttcttttaaggaaattacacattacggatatagctaaagtcccttctaatggccatccctggttctataccctttctccaagagggaaccattattatgagtttgaggtaaatcctcatattttaaaaatgtttccatccattcatatgtatccacaaataatgcatgctatttttacattttaaaatgtatatgagtgatatgcttttcatatcattctgaatcttttttctatctacccaacattatataacttaaaactatgcatgtggatatatgtagatctagttaattcctctaaaactgttgtataatatcccatcatataaacatatcatgttattaattcattcccctatagatggtcatttggattgtttttaatatttggccagttgcaaacaacgatgcaatatacatctggcatatgcacatgacagaatttctccagggaatatatttagaaatgggattttttgaatagctcatagaggatgtactttctttctttcttttttcttttttttttttagagacagggtctcactctgtcgcacaggcaggaatgcagtggcatgatcatggcaaggatgtacatttttaaatgttattagctgctgcttatttgtaataatgctatcattttctcaataccctcatcaacactttattttatttatttattctttagagacagggtcttgctctgttgtccatcctggagtacaatggtgcaatcaatcatagctcactgcagccttgaccacccgggtcaagcaatcctccatctcggcctcccaaagtgctgggattacaggtatgaacccctgcatccggcaacactttatattgttaggccttttaatttttcccaatctggtggactgggcaaaaaatagtatctcacttttcttttcatggctttagtggctatttgaatattcctttgtatgaattttctgttcatatgtttctcatttttctgttgggttgtctttttcttacagattatagaaattctttatatattctgatagatacattatatattgcaaatatctcccagtaaattgttcaccttttaatcttgcacatggtatattttgcctgagataagatttaattttagcaaagttaagtaatctatttttttattttataggatgttcttactgtgtctttcttgtttgagaaatcattctctatcctgggtcatgaaaaatattttcttataatttcttctaactgtttttcatgtttaggtcactaaaacatctatattttacttttgttaatgacatgtcacagctctgttattaaatagtctttcttttccctaatgattagtggtgacatctctaacatatgctacattcttatatatagatagaaatctgttctcgggtcctctgatctgttttattggtttatttatctattcctgtgttaattaggatgttaagaacccaagctgctattatgagagttccaacaatcatgtgacttaaaaaacaaagtttatattttatgcacataaccttgcaaggtgagctctgctccgtggagcctttccttcatgctgctggcccaacacaggttggccaggggctgtgctctttgtcatgtccatgctaggacctcagctaatggagcagccactatctgaaatgttggtgattgccatggaagagagaaagagagtgctggatggtcttgtaccaatcattaaatgtgtcctcctagaagtgacacacttcacttcagctcacaactcattggccccatgtaactgaaagagaccaggaaatgcaggcctatcatgtgccacaaggcaaagagctgggaatgtttggggaacagtattaatgactataacacacatgcattttaagtttataaatttccctcgaaatacggctttaactgctccttagaaattttacccaagactttcattatcattttaaaataagcatctcattttgtaatagttttagatttaaagaaaaattatgaagataggaactggaaagtttccatataacccctctcaatttcccttacttaacatcttatattagtatgatatatttgtcattattaatgaaccacaatacattattattattattattattattattattattactctgttacccaggctaaagtgcagtggtgcaatcacgtctcactgcagccttgacctcctgggctcaagtgatcctcctgcctcagcctcccgagtagctgggaccacaggcacacgccaccacacctggctaagagatggggtctctttatgttgcccaggctggtcttgaactcctggactcaagtgattcttctacctcagcctctcaaagtgttgggattacaggcgtgagccaccacacccagctccaatacattattattaattaaaacccatactttaattcagatttcctctgtttttacctgatgtccttttcctgtttctttttggaatatttattattttatttattatatgagatccaggagagaaaggagcaatgtaaaatccagcaatccctagtggtatatatccaaaagaaagaaaattagtcttttgaagagacacccacagttgcatgtttattgtggcaccattcgcaatagccaagacatggaatcagcctaagtgtctatcaacagaggaatggataaagaaaatgtattatgtatacacaacggaacattattcagccacaaaaaagaatgatcctcctgcctcaggaagatcctgtcaattgcaacaacatggatgggattgaaggaacctaatgtcctttctcgattccaggatcccatccaggatgctgcgttacatttaatcatcatgtctccttcggccccttttgtctgtgacagtatctccggtgttccttgtttttcatgaccttaacagttttaaggagtactggtcaggtattttgtagaatgttcctcaactgggattcatctgatagtcttctcatgtttacactgaggttatatttgtatgtttgtttgtttgtttgtttgtttgttttgagatggagtctcgctctgtcacccaggctggagtgcaatggcacgatctcggctcactgcaacctctgcctcccaggttcaagtgattctcctgcctcagcctcccgagtagctgggattacaggtgctggccaccacacccagctaatttttgtatttttgtagagatgaggtttcaccatgttggccaggctggtcttgaactcctgacctcaggtgatcctcaggtgatcggcccaccttggcctcccaaagtgcagggattacaggtgcaagccacaaggttatggttcttttgagagggagatcacagaagtaaagtgtcattctcatgacatcataccaagggcttatactattgataggatatcgctgttgatgttaaccttgatcacacagctaaggtagtgcttgtcaggtttctctactgtaaagttactcctcctccatcaccccttccataatgtactttttttttttttttttttagacagagtcttgctctgtcacccaggctagtgtgcagtggcgcgatgtcagctcactgcaacctccgcctcctgggttcaagcaattctcctgcctcagcctcccaaggggctgggattacaggcacctgccaccaggcctggctaatttttgcatttttagtagagacagggtttcgccatgttggccaggctgttcttgaactcctgactcaagtgatccacccgcttcggcctcccaaagtgctaggattacaggcatgagccaccacgccccacccataatgtactttttggaagaaaatcactatgctaagcccacacataaggaataggaagttatgttccacctcctggaaggcagagcctctacataattgaaattcctctgcacaggaggcttgtctattctccccattaatttatttattcaaccatgtatttgtatcagtatggattcatggatatttatttactttggattataatccaatactgtgttatttattttgttgctcaaattattccagccttggccactgggagcactttcggtgggctcctgtgtgtcttagacataccctcatcaatgtgagttgttttatatctgagcatttccttattttttggcactaaaagatgctccaggctcatcttgtatatttcctgtctagtcctagaatcagacgtttttccaagaaccctggttcttttcactggagaatggtattagaaaccaagatctgagcactaggtgtgattgttgctactggtggtcattgcttctaggccctcagttggcaaggcgaagaaatatatgtgtgtatactgaccatttatccacacatatctatacaaaattctatatgtaatcatctgtatttctattgagctaaacataagttcatctgctgtctccacctctcatccattaccacatggatcattcaacttcaagttcaatgctttgcttatgtataacctcccattacaaccacttgctgggagcagtgaaactctgggtcccatctgtttacttaaatgttcaacaaacccccgtaacatgggtttccctgtataacaaacctgcacatgtacccctgaacctaaaataaaggttaaagaaaagtttaattccagtatacatatatagtggtttcgaatttctaaccttttcattattattattattattattattattattattattattattattattattatttgagacagggtctcactctgtcacccaggctgaagtgcaatggtgcaatctcaggtcactgcaacctccgcctcccaggttcaagcaattctcctgcctcagcctcccgagtagctagaattacaggtgcacaccaccatgcctggctaattttcataatattagaagagatgaggtttctccatgttggccaggctggtcttgaactcctggcctcaggtgatccacccatctcagcttcccaaagtactgggattacagtcgtgagccaccactcctggcctcattatcatttaattctaaatatttaattaattgacattggtttactctttaactatgaattatttagaagtttggggggttttttgtttcataacgtagaaggttttgatagcttgctttttctgtggttgatttctaattttattgcattgtggtctgaaaacatgttctgtataatgttgattctctggaatgttttgagagttcctctgtgatctaatacgtaattctagtaacagttccatgtgtgattggggaaaaacatatgaattttggtacatctactctatgccattaaaaacatcattatgaaaatgtagaaagtacacaaatgtttgagataatgtgaaatggaaaaaagaacatgaaacacgtgatattagcagcaatgtaaaatcttcaggcataaaaacaaagactggaaaagaataaacaagaatgaaaataagcattgactactagtggtaggattctagataatttttttcttacctcaaaattgtatttaatgtgttttactgtttctgtaattcacaaaactctaaaaaatgtttaccctggaaaatattggtttggataaattaacaaaggcttaagagcatttagtactacagccttttttttttttttttgagacatggtctctgttgcccaggctggagtgcaatggcgtgatcacagctcactgcagcctcaagttcctgagctcaagcaatcctcctgcctcagcctcctaagtaggtaggactattgatgcatgccaccatacctggccaattttttataattttttatagagattagatctccctatgtttcccaggttggtcttgaagtcctggcctcaagcaatcctcttgcctcggcctcccaaagtgcaaggattatagactcgagccaccacactcggccaacagacattttttgagctcttgctatgtgtagggcaccatgctagatcttagggatccagaaatgttaagtcgaggtcactttcttcagtttctaactctaaatgtcatggatatgtagttcagaaagggcagaccaagcacaaggaattcctatacagggcacctagtgagagggccccagagaggtccttatatggtgtggctggaagacaccattgggagaaattaatttagactcagccaggggagaagagggtatgcaaagtttatggtgggattcacaaaggatctcaagggggtggacacagggaggaactacaggcaaaggggagaccttgaataatactaaaatttgatatttgcataagattttatagtttacacaccctcctagcacacacacacatgcacacacacacaagttcattgctttttacctatatttatgctatttatcctgtgaggcagacattactctttttatacccatttttacagttgaaaactgaggttcagagagggaaagcaacttgtccaaagttacacaactggaaagtgacagagccaggactccgatactagtcttctcgctccaggtggaggtttcttcaggtaaacccctctttgaaaataactctttggcaatgcacttaaaaagagccataaaaatggctcatcaaagctgtcccactcagtgagaagaatagtatcaagtgtcctctcaagaaggagctattgtgaacacagaaactgaggaccagaaagtcaagctaggtggacggttgagctgaactaaaactgaattgggtgttttgtggaactagactcttgtcctttgctgagcacagaaggggcccatccagctaccccagagggcaccagaccttggtgctgggagctcaaagccaatgcagccactggtccattctaacccagctctgcagcctctattcacatagtccctcagactgtgaaatgaatgaatgaatgaatgaatgaatgaacaaaaatgttctgcttctcacctccacctttttccccaccacccgcctacttggtgtgagagccctgttctccactcccaaaggtcaacccccaacatccctcctctactatctgcagggaatctactcaacctcttcagtctgacttctcaaccagtaccttatccccctcctcctgccaccttcttagctgcccccaagcctggccctgggaggagcgaaggttacctgggaactagcattcccaatgctgcccccgcccccccgccccacaatacacactcagttactgactctcccacttcttctcccaattttctcatcctgctgctaagctgtccttttaactggcatcctatatggcttttttttttttcttttgagatggagtcttgctctgtcacccaggctggagtacaatggtgcgatctcggctcactgcagcctccacctcccgagttcaagtgattctcctgcctcagtctcccaagtagctgggattacaggcgcctgccaccgtgcttggctaatttttgtatttttggtagagatggggttttgccgtgttagccaggttggttttgagctcctaacctcaggtgatctgcctgccttggcctcccaaagtgctgggattacaggtgggagccaccgtgcctggcctaacatgttatatgtatttattacagacaatctcaaatccgtttttaaagagaatagggtgtgacttcattaataataaacacatatttcttagacaaacacatatttaagaaatatttattggacacctattatgtgtgtagctttgtgttaaacgctggcaatacagtgacaagcaaaacagctacagttcctaccctgatagagtgtacagtctagtcaggggagcagacactaagaagtatgcttataaataaatacatacagttgttcctctgtacctgcaagttctgcatccacaggttcaatcagccatggatcaaaaatactcttaaaaaaaaaagaataggccgggcacaatggctcacgcctgtcatcgcagcacattgtgaggccgaggtaggcagatcacctgaggtcaggggtccaaaaccaacctggccaacatggtaaaaccctgtctctagtaaaaatacaaaaaaatcagctaggcatggtggtgtgcacctgtaatcccaactactggggtggctgaggcaggagaattgcttgaacctgggaggtgtaggttgcagtgagccaagattgcgccaccgcactccagcctgggtgacggagtgaaactgtctcaagaataaataagtaaaaaaaaaaaatacagcaataaaaaacaatgtaatataacaactatttacatagcatttacattgtattgggtgttataagtagtcagacttgatttaaagtctaagggaggatatgcatagattatatgtaaatattatactccaccattttatacaagggacttgagcatcctcgaattttggtatccgaggggagtcctagaaccaacctctcacagataccaaggggcaattgtacgtgtgacaagagctttgaaagaaaaaaataacagaagatgcctactctagatttgcacagaatgcagagctagtaagagctctaatgatcacaatacacgcactgaagtctatacatttccctgtaagcactgctttaactgcaccctgtaaatgttgacattaagtgcattcattatcattcaattctaaatatttaataatttttgttgatttctttttaacccacagataatgttgaggtgaagttattgtttgtttgttttttgtttgtttgtttgagacggagtcttgctctgtcaccaggctggattacagtggcgtggtctcggcacactgcaacctctgcctcccgggttcaagtcattctcctgcctcaacctcccaagtagctgggattacaggcgcccaccaccccacccagctaatttttgtatttttagtagagacggatttcaccatgttggccaggatggtctccatctcctgacctcgtgatccgcccacttggcctcccaaagtgctgggattacaggcatgagccactgcgcccggccgaggtcaagtttttcatttcaaaacatgtagggttttggtaactctcttttggtggttgatttctaattttattgcattatgagctgagaaccataacgttctgtatatggtaattctctggaatgtttttaagacgtctcttgtgacctaataattgtccacactgggctaccattccacgtccaactaaataaaaataaagtctatacattttggtatatcaacgtatatcaatgccattaaaaggattattaaaaagatcatgagaatggagagatgaaaaagctgcccaggagagaagctgagggaagaaaacgtgtgaaggctttggggcagaaaggaaccattgaaagcctagactggcggtgaggctgtagccagagagagtcaggagcgggcagacactgataggggtgaagtaggcaggggccaatttataaataaataaaatggaaaataatatacgtgaataatggccgaatagcattacaagagccagtcatcacctccaggcccccactggtctccctcaagaaagtacagggcagcggagacttcatctcgagctgatttggactttgggggtcagaaagataactcagcgggccagtgcagtccgcctcccctggttcccagctcgattccctccaccacctttcagcctcaggtttcctcacctgggagtaagatccacccctcaggcggttctgagctcaggggatggacctaatggctgcaaggcctgcgtcctaacgggcttgcagaactgccagcgcccggccctgcttctgtgtcatctctctgcctattcggggcgctcccaagtgcgggctagtgcggtggtgacgcgccgcagctgcagtgtgccagagcctgggtgcgaatgcagccattctgctagctgtccctgggccggctgagactctgggtgtccaagtcagcatccgtaaaaatggaagcaatcactcgatccacctcatatggtggggggaggggtaactgagcgcataactcactttaaacacctggctccgagcctggcacttaataagcgctcattaaacgagggtgtccttgccttgccgtctcccgcattcgggccgctccccgcatttccaccccgctcccactgctgggtaaatgttcatctggacggggacaggatcgggaaccgccgggcagggggtctgcgcggcggcgtcctcccctccccgcccggctctcccgctccatccccgcggcctggccaagggcagcgccaagggcgcccgcggagggcgcagctgccccggacggagcccccgccacccccacagccgcgcgggtgctccagagcatccaacttcatttccacttcaattttatcagcggccggggagccgggcgggagataggaggccggccctgacacgaattagcccggagattgtccgatacgccttggccagggcgccggcgccgcgcgctcgcctccctcgcctctcctttgtgtccgcctcgcctcgcctctcggcctcgccgcgctccattcccgcggcgctggcccgggccgagcgaactgctttgcctttggccacgttgagcgcgccgaggcagccgggggcgcggggctccaggacccgtctgctcctggtgcccccagctcctcagggtccggccgggtcacctgggccgatccaggcgggcaggggcctcgctgctcctcccccgcagcccctctcgccctcccggggaccgtgtgcggggagcagctgggagctgcgtctggaggggctgtccgactggggaacttgtcctgtgccttgtccatgccattacattcatcctcccaagaaccctgagaaatgaggagatcgtcagagaaggggaaactgaggctcagagaggcgacagtactcgcccaaggtcacgctgcgagtaagtggtcatctgtccattccctagagcctcggtgaggggggttgtcgggcatatttacacagttggcatttcccctttacctactatgggaggttgcgagaattgattattccccacatttattgcaagaaggaggccaaatatgatgaggatgatggaggcacttaaagcttgcaaagacaggtgcatgacttccttccaaaccctcttctcccaggtgccctcccaggacacaccccctcccaagcttcctccccacttccccctataaccccccaccccaatccaggcttgacccaaagacactgttttgctatgttccagctagaccaatggtggaggcccaagaaccatctctgggacccagcaggggtctctccccagcccctccctagagcttggggtgaggaatgctagccctgcctggcttcccacctctgttttggggtgcttctggggaaaatttatatccctctcaggtttgggaaccaatcccacactaaaaagaaagaagaaagagagaaggaaatgattttaatttttttaggtccagaaatgaagcagaagtgagtaaattttaatgaaacggtgcaaaaatgacatcatttactcagaaatcattaatttgtcagcattaatatttcagctacaacattgcctgtcattttgtgcctgcaatgactgataaatctataaaagcgtgctgctaatttactgaatatttatgtgcagtgtcatttgcagagtaagaatggaatttatttcatgccgagttctgcgggagaacattccccacaaaccttcaccctggtaggtgggggagggcagggggagactccaaacttcctggaaaactggtaacaggatgagaagaaagggggcccctcggggctcagcccccccagccccagagcacagggagggaacacctcacttttgctcaggtggtgcaaaggcactcctgggatcccctccgtgcccccatcgtggccagttcacatttgacctctcctgcagcattctcctcaaagctatctgctcccagaaaggcgccctggattctgctgccctctcactgcagtgggaaggtgcggttactggctcgctggtgtggggcaggccctagagaggatggcagggcaggtgggctgcaggtcctggatgggttatcagaagaggggacctgaggccgggggtagtggctcatgcctgtaatcccagtgctttgggaggccaaggcaggaggatcacttgaggtcaggagttcgagaccagccccaccaacatggtgaaatactaaaaatacaaaaattagccaggtgtggtggtgggcacctgtaatcccagctactcaggaagctgaggcaggagaattgcttgaacctgggaggcagaggttgcagtgagccaagatcgcgccactccactctaacctgggtgagagagggagactctgtctcaaaaaaaagaaaagaaaaaaagaagaagaagaagaagaggggatctgagaagagctaatgtgcctaacgtggagtcaggcagcctgagttccagtcctggctctgtgaatattctcagcagtctgggtctcagtgtcctcatctggaacatgggaacgctatcagcacctgcttccagagacacagtgaggattggctgacctaatgcatgtaacggacccgggaaacattagctactgctgctgctgctgtcactgaaagaatcactgccagattccctgctcctggggtgttctttttctgggtctttttccccaggtgggaagtgggaggccctgagaccccatccccacaatcctgagaggaacacaacccccaacaaggctcctccctcccctacgtgggtctgcttccccagcctcaaaggggagtcccattctcctcacccactcccttctcatttccataggctgagtctccagaattccatggtggtatctatccagaagcaccttcctgaagcgcccagcccagccggtgtttccctggccctcagagctgtccatttcacagagagcaaaatcaaggctctgagagtggtgccagctgcctaacgacccctcgcccccatttcccctttcccatcccaacaagagcacaaatcacgagccttcaggttttgcacaattttgctcaatttcctgcctgaatggcacagggcctgaccctctgcaggtgctcaggaaatgttcgtggaatcaataaaggacagctaaatctcccatcttctgaaagctctttgtctcctccctccctcctgctccccacactccatcagggtggctggtggcctcctcctctggaaagcctctcgaatggctcctttctcttctttgcccctgctgctgctctagtggagtccttgctagcacttacgcgggccactgcactaggctgctcagaggtctctctacctccatttcccacctctgatgcagtcgccctgagctgccagcgctctctcaggagcatcctgccagcaccactccctaacttacagctccagcggcccccactgctggagaaatggcgcccgcctgcccttccagatctggcatgctggcctcttcttcctctctgagagccccgcctgctatttaacatgcaggtcaacacttgtctgtctccagggctttgctgtcccttctgcccagtgtccttccattcctcacagccaaatcacatctatccttcaaggcccatcacagccgatcctggtcccttcagaattcctcctcatccaagcaaggccacggggacagggagctgccttctctcccaagcaagccctagtgtgggagaaaatgtcaggcaaaggaaaggaagggcacccattgtctgcatcttggggagaacactggactggtggtcggggggcctgggttctctttctggtcagcactgtgtggccttgaccttgcctatctatgaaatgggctggtccagatctctccagtccacactctgaatctatcttgttcacggctgcatcttgcaccaagcctagcacaaggcacatagttcctcaataaatactcactgagtgacagacttctaaagccctgctctatgccagggttctgagattctgcaacttggtattgtccaggcagacatttgggggactacccagggacaggcagaaggaactgcttcactaccaacattgaagagtggcagactttcacataaatgacattatttaatcctcgtaacagccctgtggcctgcacttccccatcaccatttcacagatgaggaaactgaggctagaaggttaagtgacctgatcaagctcacacccaggtccttggcttcaaatccagtgctctttctgctgcccccaaatgctttcatttgctcttagaataaaccccaagacttctgtggcctgtgagactgtgtgatcatgcccctgagatcttcttcaaactcactcgcccccctggatcagagccacactggactctggctgctccttgaacgctgtaagctcattccctcctccaggcctttgcactgctatttcctccgcctggaaagtttgtcttcgccatccagatctcagctcccatgccaccttttcagaggccttccttgcccaccaagctaaaatagatatttcgtttccctcagacaccacctgacacggtctcatatgtctgtggcctgttggttgcctgtgtcctccctgagggttcctgtctggccctataagctaggtctctggaacgcacctggctgagagtgactattggatggatggatccatgccttgcagctctgcctgggtatgttagaggaaaactatgaacctcctgtcttccaggagaagagatggggtggctggaaggcagggatgtggtaggttgggggcaccaggaatgcaaggtgcagcccagtcccagaagctggaatccagaaaagggaggctgggaggcactgcccacccttgtcctagccacgcccccctccacccccatgcctcacactcatttccttcccggagtcagtctcatttgctttccctaaaagccgctggaggagccaatatgtacgtgatgaatatttcatctcctgagcgtgggtttgcgggagagctgtgatcccctggggagggagcactgcccagccgtgcctgggaagaaggggggctgagaggggcactggcaataggctctgaagaaggcaggttttagggtccacccacctgctcctgccgacaccgttggccttgggaggctcagagaggtcagggcagcccgaatctgaggcacaaatacttcgtgccccatggggctcccagtccttcgttggggttcgcctgtggcaaggggcagatgttttcctgagcccagagatgcatgaaaaatggggaaaatgaggcttagggaggctgagagggagaggggagagaacaataccagggttctgaggttctgaggtttgcgcacccacgaacccacactcaggagatgtccaggctgaaggtgccactggcatgactatggctgaaggtgtggagcacatcctggtcctcacatatagtggcccctcaaataggagtcctgggaactgtctccccctggggatgggggctgggaagctacagcctgagaagggaagggagggacaggtaagcacagaggaagaaggaggaatgaggagcatgtggctcacttcgctcctgccctgtgcccatccccagccccacgctgtgctctccacccttcccctccgtggccacagcagccaatgatggccaaggcaagcttatccagctctggaagctgccagtcctggttgccagtcctctgctccctcaccagttgactgacctttgaatctacctaaacctcagtttccccatttgaaaaatagcattagttataccacctggctgggtaattctgaagggccagcagagtgcctggcacatgataaagactcaggggatttacagtctacaccacatacacatgcacacaggcacacacacgccccaccatcacctctcctctgtcatccacctctggtttgaaaacaaaggaccacccgttgcctcctccttcacccaggctctctcacctctccctctaccctgtccaccccctcaccacacaccccactccacaaccttgagcctctgttccctgaggagcggagtgggcgttgggaaggaaggggaggtatctcatctcctgggcctcggccagccctgggtcaagacgaccccttgccgcagtgtcccccagccctctgcagccagatctgcccctcccccggcggccaggctcagtcccgtccctccatccccacccaccacattaccctctgaatactctcattataccattactaattagggctgctcagcaaattggcggctgcattcgagggagacagtgtgcggagcatatggcataatatcatattaatgaacactctaaattcaaacccgggtcagctgctcgcttctcgccagtgtcacccacgctaaaggagggaggggaaaaaaagcagtcaacctttccctcccttcccttgcctctctccaaacacacattctgcagcgtgggctgggctgggctggcatcgcactgtggacctgcatggcccaaagaagggcctccctcccgccatgtgtaagcggacgcttctacgattagaactaattaataataaaccagggccatggccgggctcttcccctatattatctctgtggttcccaacatccctgccgagggggcttcagcacaggggggcgaactgagagcctctgaggtcacggtgctttttccgggtgacagggtggctgggctggacatcaacctaggctttctgctctccagtcctgcttgtcctgctctgtccagcccacaggtggagaatttggctcgtcaagttctacccggcacacctgggtggacaagcaccttcctctttctcattctctctccctcgcctctctcccacgttctacagaggacgcgaagatgatgaattcacgtatggcctgggagtgttggtggtacccccggcctccctgcatcctgggaggaggagacgaagcggaagcttgggtggggggcggattctggggtcagtctgaggaggccttggggaagaagtgagcgctaagcaaggctcccaagaggaatggaagggcctgaaccaaagctggcttgccctcagccagggggcagtgcccacagatgccctggatggagcctgtccaaggcgtcctgtgtctgctagtctgagccagggatgagcctgaacgggcctcccatgctatccatctttctgtctgatgggctgttgtcagtatcctcaataggatcacaggtttcttgagctcccaattcctcatttcacatcaaggtaagaggctgcttcatgcctgctgcccttgagcccagagactgcggaaagcgaggggctggccacttgtgcacacatctcctatctctgcccaggcttgtccttgccctgatcaaagcatccttcaattttgcctcccccaaggagccttccctgattaagaccacagagtccttagcatctgagagtgtcttagagattgatcttaggtggtgtccccaaattgaggactgggcctttctatcacagaagggagggtggccagatcctcaccgaaacaaataaacaaaaacctctcctgcctgtgcctgcccccactccaaactcggggagctgagcttcctaagctggggcatcctccgggtgtctcagatatgggggtgctctgggctgggagtcaaggtggatttcacctccaattaagtcacagtgcaaaccccttcgggccccttctctggctgcaatctttgtgaattcagttcctgacatcctcccagtcctcctcacccaggggctgtgaagatcagcagatgttccgggcccaggaaagtgtttatcaggacacattgttagggggaatcttgtcaaagaattggagcttccaggctcctctctcaagtctaacaggaacaaggacttcctgtccacctcttgggtgtatgtgatgagtgtatgtgtgtgtgtgtatgtgatgtgtatgtgatgagtctgttggggaggactggggatgatttggggtgtttactttcttagcagggccccaatccggaatcagggaggagtcacttgggttttgaccttcgttttactgtaggtctccagggagtgagtgccttctttctttacttctccgtctatggaatgggtatattcacagtagcttagccgggactgagagatgcttctgtgaaagacccactccgtgaggcttgagactctggcctagctgggcatccaccacctcccacctcctgcgttggcgccatcaagatggaagagctgcctgaccaagtgactgctcctctcctgggctgtcacacaggaagagaggctggagtgccctgtgccactgcccagagacctctgctgtgggcagccttgagctagccagctgtggggcccttgctgccacccaaggtgtgagaggcccccttggcgacagacattcagccccccaccgcatgacaggtgccttcgtctgtgtctgcggcaccagaacccagcctcagccacttgggggctctgcctgtgcatgccacccccccgccccgcacccccagccaccctgcctggtatccaggccacactgtctcatcctgggccctgccccactcgccaccactcacaccatggtcatagaatcattttcctttgtctccagaacccacacaccctcccctcctccccgtagctctaccagcaggggagcccaggagaagcagactagccaggcggaacgcaggggtgtcagtgagccctggatgacagttatttatctgcccccaccaagccattacctacccccccaccccgccccgccccgctgctggacccccatcccttccctctccgctagtagaggagtaaacaaacccactcagggggaggtgttggctggtctctggattttagaagctgcttgtgaggacttgtctgggggtggggacaaccccactccatctctccagaggcaataatgcaactctatgttgcagatttggctctgtcgtgcgtgtgtgtgcgtgtgtgtgcatgtgtgtgcctgtgtgcgtgtgtacctgcgtgtgtgcgtgtgcgtgcatgtgcgtgtgtgtgtgtgcatgtgcgtacgtgtgtgggtgtgtgcatgtgttgcgtgtgtacgtgtatgcgcgtgtgtgtgcatgtgtgcatgcatgtgcgtgcatgcatgtgtgtgtgaaccaaggttccaaggaggtctggactcttcccaaagaggagaggctgagctagaagggagctgaaaggccatctccttggaagcctgaacctggggcccagggaggtgagggaccttccccaggtgacaaagccagcaggaggaaccctcaggtctgggtaaagtgtactttccacaagtgacccctattgctagatctctgttcagagaccctgtaaacaccacaaccccatacccacacttttcacacagtcttctcccattggccctatgtctggggtgagaatgggaccagctacactacttgtagttcccgatgcaaaatgaaagtgcaggccccttgttcagacattattaaggctttcaagatagcgacagaagagcattaaaccattaaaccttctaaccacagggctctgtacacagatcaccagcccatgaacctggccctgggctaggaccttgtcaatctatttcctctgcagctgtgaagaccttgggtaaaatccccacacacattctagaagcctccctgcctggtaccagggttccatagccactgccacccccaccacagcagtcagctcagtgactccagcctggggaggggaaactgagtcagcattctggacctgggctgatccccagaatcaggtggcgagctggcctgggggtgagactgcacctgtctcttgcagcgggcagtgggcataggctctagcatgaagagagaagctgctcagagctaaggctctgcggatttcagaagaggcaggagccagggttttctgggagctgtacttcctccttgtttccgtatatcttgtagagggcctgtgttgttcacttttgtgggtatgtaatgttgtatatgcaaagaaagcctgtgctgtgtgcctcatgtgtgcactgcacacttgtgtgtgcactcacagcccaagtgcaaggtaggctggcttactgcccactcccctacccacctggtgccacccccgtgggtgtccaggcccccatgcccatggagggcatgttcctatccttgggcattctgcattggaattcaggcccttgccagcctgttccgtgctcgctaactataaactatctgatttatattcattaaccagtactagacagcggcaggcacaggctaacttcagtgggggacaggcctccatcgacaggtggactgcatttcagttaattaaggggctgtaattgttgtacaggacaagggtccccagggcacaggctttgtaaataactaccctccactgcccccacctttcaccccacccctccccgcctactttcctccttcacaggtctcagaagccaggtaaagtagctgggacaggaaagaagactgtggagaggtgggagtgaagacctggttggcgggggatgcccctcctacatccttgcaaggctacaattccctggggtgggctggggctgggctgggggagccctgggcagagcatggtgggctgggtcataaacaatgatcttactgcccaaactggctgagtccaggaaggcaggacccacctccacacacgcactcttgcacgcaggaacaaacacagacacacaaaggtacacatgcacacctctccagatctagttatttatgctgttttcccctcacctgcctacatacccaccctgtgagctcagccctggcacctgggcactgggcaggctttctggcatctgttcggcacagggagacttcagggggtcaggcagaaactaaacaagaaggagctgtcatctcaccaacctagaaaaatgaagggaggcacctacctctcataagaattgatgagggaggcttgtggcctttggaactctcaaatagggtgacttctggtctgataggggatgggagggccatccaggggctcccactttgatagcgaagagggtccctcctctaaagaaattcctgacatagagcgagggacgggaggtggtctgggaagacaggagtctgatgacggaggtacacactaaagacgcccacagcaccagtgtgaacaggtatcattcaagtgtgtggatggtcctggagaatgccacagagcaggcagggcctccgaggagacgagaatcttgaccagagctttaaattaagggatgatccaactatggcagcggaggaggcagctttgccccaggactgttgcttccagctcttctttgcacagatgcctccaagtgcccactgtgtgccagaggcaaataaaactgccaggttccctgccctcccagagagcaaagagtgagagaccacgtgtgcacgcatgtgtatacatacctgtatgtgtgcaggtcatgtgtatgtatgcctatgtgctctgagcatattttccaaatatcagttgagggtctgctacatttcaaacaccctatggacacaggacaaaacagcaagcatgacattcacctgtgtacatgtgtgtgggcatgtgatacgtgtctgtgtagtgtgcacatgtgtctgtgtgtgcgtgtgcaggccctgcaacggagctttcgccagcccactcaggacttgaaccaagtctcctaccttgcaatcattctcctggaattactatccttggatatttttgaacctgtgactacttctgcttgcactgcccacctccaccccttgctgtgggccaagggagcctatatgtgttttgttttctgcctaaaaatgtatctgctgatcttgagtcactgaataatcaccctaagtcaaatcagaattgagttttgttaggctcaggtgggtggatcgcttgagctcaggagttcaagaccagccagggtagcatggtgaaaccccatctctaacagaaatacaaaaaaaagcagccgggcttggtggcgcatgcctgtgttcccagctacccaggaggctgaagtgggaggatcacttgagcctgggaggtggaggttgcagtgagctaagatcacaccattgcactccagcctgaatgactgactgagaccccatctcaaaaaagagagaaagaaaaaagaactgttttttgtgaacttcactcgcagttcagggtatctgcacccatcctccaccctgccccccacccacaccccatcccaggcataaatcgcaaagttggccacaacccttacagcgactttcgacaaggtgctctggaagtaggcatttaacttggatctatctagacagagtctagcaaagaagagaaaataagtttccatgtctatcccccgccccacccccatttccacctatcagcccttatctaaaggaaaaattagagagttattaggaatttgattaggggtgagcaggttggtaatgaaattacatttcagctctttctcagcccctgtaagtattaagtggtttgatcaatggtgttcatacaattaattctgcctgattgcagagagtgactctatcgacagccgggtttcccacctcgaactttgtctcttagccaaacgtgccttcgggaagcttggagggtgcaggtgggggcccctgtcagtgaagccctttgctgaatgccaccttcaagctcatatggattattttttctttaagcttaaaggaaatttaggaatcacatcaaaattaaattattgagttctagaccaggagagacgagatcacacaccctcctgcaccagtttcttcatttgaccagcgtttcttgagcacccacaccagctctgagacctaatcctctccaggctcccttcctgggacagggcaacacagccatcttcccctagcctctcctgggtgttatccctggctatcaagagagccttccctgtatctcactcaaatctctgctgctttaatttaatccaccgactctcgttgggtcttttagggatgtagaaggctgcttcatatggcccttcatgaaacaacacccccgacaacaaaggttgtattcttgaagctggggaacctccaatttctgggactctgcccacaatgacatatttctttccgtcacccaccctgtgtccctgtggcctctggacacattgcttcagcaggggtggggtggcactttgtaggtttgtggcgactctttacataattccagagtaagccctgctgctcaggaagcttccctggagaggttacatttcctggaggggaaggctgttaggggtgtgggtgaccatgagatgctgggaaggctgaaggggcaaagagaggacacagatagactgagactgggaaccacgaaactttctaatattgtattatttgaaccttcactgaaggacatgtgctgttgtttatttgtctgtttgttttttaagatgaagttttgctcttgttgcccaggctggagtgcaatgggaggatcttggctcactgtaaactctacctcccgggttcaagcgattctcctgcctcagccagtagctgggattacaggcatgcaccaccctacccagataatttttgtatttttggtagagttggggtttcaccgtgttgaccaggctgatctcgaactcctgacctaaagtggcccaccgcctcggcctcccaaagtgctgggattataggcgtgagctaccgtgcccagccagaacgtgctgttttaagatgtggattcatgaaattctcccaactgcccgatgaaatagatgctcttttatgctcctaaagcagataagaaaacggagggatagatgagttaaggtctcctccaacctagtaagtggtgggacttcctgagaggaagagtggaaagggaacctgctttccttgctcagctggggctcaccctaatgccccaaagacctcctccacctttgggcagcccttctccagcagaaacagaagtgagggcttgccagcagccctggggcaccccagtcactcacccttacctgcgctttttttctcaatgtcaagaaggcctccttgctagcatatctgcctcagtatcccaagaattcctgttgggtcacttgtccagttctgacagcaatgggcaaattgtaacatccaatgccagcgctgcagcaccaggggttaacagaggaaccccttgaaggaaaaggattctgtgctcctaactagcaggatgtactgagtgaagaggccaactggccaaagccttgggtgaggggcttgtgggccagggaggtggccttttacctgtttggccaaaaagaagggaaaggaaatggttataaggccctctttctttttgtaaatgtttactccagattctcagcccaacaaccataatgaccaacaatgaagcatgcagtccactaattttcatccattcatcttataggatatatgcatcaacaatacataaaaacataggcacatgtccatgatatagtgttaaaggggaaaagcagtatgagcccaacttggagtctgtgtgtgtgtgtgtgtgtgtgtgtgtgtgtgtgtgcgcgtgaggccctgtgctgagcagtagccacaggtaatcttgtgtacccctgttcgtaatcctgtggggtgatagcataattatcctctttttataaatggggaaactgaggctgagagcatttaggtcactcacccaacacagctaatacctggtaaagtcacgattcacatgtgctcttaatcattgccttataatgatcctgtatccttggccaatccttttcaccttacaaaggatattcgtgtttatgatttcaaataaaaatattcacagccactccaacaagcatctaataatgagcccattttagagattaagaaactgacactcaaagaagttaggagacttgcccaaagtcacagagctaatcaactgttgcaaaagaaggactccaactcaggtctgtacagatgcaaaaccctgcactatttcagagaaaaatagaaacagagataagagaagccaacatggacagacatcaaaacagacacagcagagacagagtgacacacagcctgaaaaagggaaaaaaagcatttccctccctctgcctgtctctactcaaatgcagaggggaaaatatcattttaagcaggtgccttgcagccttgcatttaagaaaaacgcatggaattaagttcctaaaaaggtaggaaagctgaaccaaaccatcactggggcttgaaatgagattttatgttttccctattctgggcactgagccgtcaatggtgccacgtgccaggctagtgaggaccacttgttcgttaggggtaccaggggatggtggctgtccgcccagcctggcccagcctggccctaccctggtgggtgccagctgcttgccaggcccatgagagggttgggctcagagaacacctgtgtgggtgttctaactccttgctgcccaaagtgtggtccacagaccagcagtacagcaccccaggggagcctgctagggatgcagagtgtcaggccctgccttctgaatcagaatttgcttgaacaggagctgggagtgacgtgtctatccatcacagtttgagaaaccctgctccagctgaaatctgaaaagaggaaggacaggcccaggtctcaaaggccttcctcccgctgcctggggcccccaaatctgagcggcgcacacagactctgggagagctgaggcctgagaggttgtggctgtgggtacaggggaaggtgggagggaggggccttcccccacctgaactgcttgaggcgcctgccagcctcagccagagagggtgggggtgggggtttgtctttgtcagcagatctttctggtaggagagtcaaggtgcccctagttccctcccctcccacgtgagtgtgagaacgctgtgtgcagggatggagggcaggtggccaagggcaccaggttcaccttccccagaggcaccatggtcttgatgcccgtccctgcccctgctggccccaaagggtcagaccgaggagctgcttctctccagaataaggaggacctcagtccctctgctccctgccccaggcctgagagtttcccttcctccttcctccgccgactcctactaaagcacctgctccccacagcctcctccaggacacctggctcacagggccagtccctctgaccatcagaacctagcaggtgtggccttcggctggctcccagcacacaactccttaaagagaccctgagaacagagactcagaggccatgagtggctgtgatggcgaagagttgtgcccatggtctcaagcctggggaaggggctgggctgccacttttagctcacagaagtagtcatcatctagttcgagaggttctcagtcctggctgcacacctaactcatttagagaactttcgaaagtacagaggcatgcggcccagcccagaccaatagaatcagaatttcttgggataggtgggagtggtaggggaagaggcatttgtcttctttaaatactcaagtgcagccacctagccagtctacccacctcactgccgatgaggaagtgtggcccaggtaacaacaatacagctgcaccccataggaagggcttactcagtgtctcacagcacagcccagactacaacctgcccaggcagcgcaacagacaccaggcactgacaggtctaccaagctcaggcgcaggtgcagagggagtacaaaggccccttcccagccgggctgggagagccctcctccctcagcctccagctgggagttggtggggcaggggcaaaaactggtgcaaagagctctgcccctcagctgctgtgtgacctcagccaagttgcttaacctcacagactctccatttgctcaagtatttaagaatgcctaggctgggcacggtgactcatgcttgtaatcccatcactttgggaggctgaagcagatggtttgcttgagcctcaagagttcaagaccagcctagccaacaaggtgagaccccattaaaaaaaaaagtcaaaaattaaaaaaaaaaaagcctaaattgcagactttcggtaaggatgcctaacacatggaggtgctcagtaaaatgttgctgaaggaatgaatgaatgagtgaatgaatgaatgaatgagtgaatgagtgaatgaatgaatgagtgaatgagtgaatgaatgaatgagtgaatgaatttacacctggtgctctactttgacacctaagatcgggaaaccaaacccaagagagtcctgctcatccaaggttcctgagcttttgaaacttctgggaagggtggaggcaggtgaggtggtggaggcttttcttcaaggggcagagtttatccacatggttgaggccccaggatttcaggccaaggcgtgggaaacttgacaagaataagtgtgtccttcatcttccagcggcctcctgccccggcctgttccactggaagagctttagctccactgtgggaggggctggactactctccttcccttcacccctctcccctgctggggcccagccaaggcacagcgcgggggtggggggtcacctagatgcagtgttgagctgtgctgagatcacagagatgctggcgcggctgacccctggggtgcaggaactggcagcgccccccatcctgggccagcaggggtgagtctagccagcagagggaggtgggaccctctcagactggtgacaggtaattggcctactctgagagctggaggaaggaagagggtgaggggagtccctctcagcctccctcctgcctacaggctccagcagcacccatgggcaccgcccataccacattcccagtcaatttcctgaacctcaaacttctccctgctagctctgcttcaccgctgctgccgctcccctttccatgaaagctgcacctcctggatttccttctctcattcctccccccaccccatgtcaccataacctccggtgccggtgctggctcccctccgtggggtgccctgggccacaggtgagaccgggcagggcccaccacaattggctcctttatcactgctttgatgagacaaaaaccctgcggatggatgaagagatcaaactaaccgtcctggggcaggaaggtggggtagggagtatctcccaggatctgagctgccatcctggggcaggagggggcactggtttgttttccttccttgagcaggtacaaaagaagccacattcacgtaaccctgcctttgaagcttgcctttgaaatctggactcctgggtctgtgccaatcaggcccagacgccagtacccccaccccacccagcccactcagccctccattgatgctgcagttgggagatcaaagggtcctggccccctcctcacctgaagtctaggaccctgggttggggacaactgtcaggaccagagcacaaacacagatttcagaggactcccaaacatgcatcgggcatctattatctgccagatgtcttcacacatagggatggcctcattcttcctcacagtcatcattgtgtcctgggtccccttttacagatgaggacacggaggctttgagaagttaaataacctatcccagtagttaggattggaaaccttccgatcccatatccagggctgtctccccactggagagtcctaccaccctaaagagaagacaattcccaattcctggccactaatccagtgatatgcttcagtccgcaaagccagcatctcataaaacgtcgcccctttcttatttcaacgtgcgctaatttccttcctcccctcctcttcacaggtaggatggacaggcagccaggtgtctgccagggagctcagttttcttcttctccaggcacatcaactctcactttgcctttgaatttctggcagcaaggactggagaacccacagaacaggaatacccctgtctcaacactgagttcccccttagaataatggaggggtggtaggggccagcccccatgcgctccttcccaggtggagagaggcagagcggaagacctcccccactccagcgcaggctgaagcctctgtcacctgaaccctcacctggccctccgcttcctctcagcaccccatctcctggccgcttacctcgctccagacaacctgatcaaaggcaagaacctgggagccattaatgatctcctcctctcctcctccgcctctctcccctctccaccccttcccctgctcttcctgccaggacataaataagcaattctcccgggcggaacaggcgtggcagaggcagaaggacccttctacatcagctccctcaagctgagacccagagagatagtgactttcttatggccacacaacaaattagtggctgagctgggaccagggtaatatttagatctttggaagcctaaacaatgaagaaattttgttttctcccgctgatataggtgtttcaaaatagaaacaatatgaagctgtgaaacagagctaataaatatcagctctgtccaatagaactttctaaatttttcatgtgtgtgtgtgtgtgtagacagggtttaaccatgttgcccaggctgttctcaaactcctggcctcccaaatagctgggactacaggcatgaatgccaccgctcgtggcccaatagaacgctctgcaatgatggaactattctgtatttgtactgtccaatatgatagtaactagccacatgtggctatgaagcacttgaatcgtgcccagtgtgactcaggagataaacttaatttcatttcactttaattgacatttatatagccgcatgatatgtgatcatgctaagttgacatcacttctttctagattttttgcttgcaaaattctggttaagtttatcaaaactgaactttttggtttgggttttgtttttttggaggggggagggaccctaaaccactaagtcttaactattgagaaaacatgtcctctctagaacccatatttgggtctgtaaaaaggaacaaatacaaagaaaaatcctatgggatgatgtcaaaagagagatagattacatcgtggcgggcatgggagggccacctaagggggactttcatggagagggcagtgaagtagaccttggaggatccgggcaggggaggttagtgagaggtaggggcatccaggcagtggaaacagcataagcaaaggcacagaggcaggaaagatagagtatgctcagggtcagtgtctagtgcacaggatatatgtaggatcagcaggacatgaagatttcccagttttctgagctgcaaagatttcccagttttctttcaccttgtgctcagatcattgtccagttttcccagaggaccaatggtggccgtctctgctggaggaagagaagacccatctgaagccatgggaagggaaggggcaagaaaggaaggcagccagtgtcaatgggccatggtgatggaggggctctgggtctccccatccacattctaactctggaagagacacccagagggtgggacagatgctgaggccaggtagaatcagaacccaaaggaccttagagccccaaactccccacctaagtctgtgccccaaggtcctcagtaacagtatcctgttccaggtggttgggagtgagaagatatcccctccatggtcaggttaaacatttataaattaaggatccaaaaaacacaaactataaattaatataagaaagaaaaaatagtgactgcaatatgggaaaagataggaacaggcaattcaaaaaagaggaaacccaaataaatgatcaacaaatagagaaagatgatccactccattagttcaggacagtgcaattaaaacagcagtgtgaggccaggcacagtggcttatgcttgtaatccgaggactttgggaggctgacgcaggaggatcacttgaacccgagtttgagaccagcctgggcaacaaagggagattccatctctacaaaaactcaaaaaattagctgggcgtggtggcatgcacttgtgttcccagctatacaggaggctgaggcaggaggaccactcgagcccagaaggttgaggctgcagtgagccatgatggcatcactgtactccttcctgggtgacagagtaagatcctggctcaaaaaaaaaaaaaaaaaaacaaaaaccccaagaaacagacagcaacacaagaacgacaaacaacagtgtgacatcatttcagatccattagactggcaaactgaaagtctgacgatacccatgtattggtgtggacgtagaacaacctaacactgttggaaggagattattcaagagttgggagattaggccgggtgaaatggctcacgcctgtaatcccagcactttgggaggccgaggcaggtggatcacctgaggtcaggagttcgagaccagcctggccaacaaggtgaaaccccatctctactaaaaaaaaaaataaaaatttatttttattatggtggtgtgcccctgtaatcccaactacttgggattacaagactgtggcaggagaattgcttgaacccgggaggcagaggttgcagtgagccatgatcgtgccattgcactccagcctgggcaacagagtcagactccatctcaaaaaaaaagagttgggaaattataaatggatacaccctctttggagagccatttggcaatatctcagaaactgttaatgtttgtacgtattgttgtattgatagttcccagtgactcacaccttccagtatccacgtcctcacacattaactctagggatggccattgacttgctctgaccaatgggttattagcaagagtaaggcaagcagaggcttaataagcactttgcacagggtggcttgttctctgggacactacttcttagaatcctgaggccaccatgttgtgagaaagcccaagctagccgcatggagaggctatcgaaaagaaaactgaggaacacatctgacagctagaaccacaggcccacgcatagggtcccgttgagctgcttcagatgtttaagtcacccaggatgcaaccccagacattgtggaaagagacaagctgttctcactgtgccctgccgaatttctaatgcatagaattgtgagcaaatagaagggatgttgttttaagccactaagtttgggggaggtctatgatgcagcaatagataactgatagacctgtcacccagcaatttcattcctagttatatgccccagagaaacccttgtatgtgtgcacaaagagaaatatacagggatgcttattatagcctatcaagaaatgaaggacaaattgaggcatatttcttcattcaataaatatggcacagagctacttgtaggaacaagaataaaacccaaaaacatactgaacaaaacacccaaggtgcagaagtttatatatgggatgccacttatataaagtttagaagtatgcaaactcatacaatataatgcttacgtatttataatctgtagttaaaacttgcatcaaaagaataaatcctaaattcaggagggtgattacctctgggaagggagggaggagaatgagtcttgggggaaacatacagggggtttccatcatacttataatgttttgtttctttaaaaagatatatatctgaagcaaagatagcaaaatgctaagatttaacaaagctgagtagaagatacatgggtgatcattatattattgtttatagttttctttgtatgagaaatatttcataataaaaaagctaatttagaaaataagaacggggtgggaggctctgaatggtgacagacaatttaagaagatatagagaccgggcatggtggctcacacctgtaatcccagtgttttagggggtcaaggcaggagaattgcttgaggccaggagtttgagagcagcctgggcaacatagtgagaccccatcttgacaaaaaattaaaaaatatttgctgggcgcagtggtgtatacctgtagtcccagctactcaggaggctgaggcaggaggatcccttgagcctgggaggtcaagcctgtagtgacctatgattgcaccactgcactccagcctaggcaacagagaacagcgccagaccatgtccccccaaaaaaagagagagagagggagagagacacaaatggagagaaggttctgatgcctcctaggcctaaacccaggcaccacctccccaggccagctgcattcctgcccatggtttcttaagtattctgtgtatccttatcatataaacccctctttcattaaaaaaaatttttttttaattttttaagactgggctcagtggctcacgcctgtagtcccagcactttgggaggccgaggtggaaggatcacttgaactcagcagttccagaccagtctgggtgacatagtgagaacctgtctttacaaaaaaagaaaaaattagctgggcatggtggtgcacacctgtagtctgagctacttgggagtctgaggtgggagaatcgcttgagccggggagtttgaggctgtagtgagttgtgatcatgccactgcactccagcctgcgcagcagagagaggctccatctctaaataaataaataaataaatttttaaaaagactgtaaatagtcaagttgcttcagcctggtggagagggtgcagagaagcagagtggtactagagcatgcaaccagggcttagaagacctgagcttgagtcaactccttcacaactctctgcaggaccttttgcaaattgctgtctctctctgaccctccatttccttctctgaaatctgaggctggtggattagatgaaggagagtcaacagacagagctatcagagccaacaaggagctcctccacacccagccaaggtgacttcatctccataagggaagggagagcaggcatttgaagaagcccctggggattgtgctacccacacctggctgagatgatctctcaggaccctccactcccagcattctaggagtccatgatgtggcggggtctacctaaattctgttaacattgttagcaaaattaataggacacatctgagggatctgatggacatactctccccgcctctcaggctagccagtccatccatccatccacccattcatgcatccacccatccatccatccacccatccatccaccatccatctgtccatccatccattcaggaaacatttattgagtgcctactataggcaggtactgtgcaaagtactggaaattcagcagtgaacaaaatagatgtaataataattaacacattaatctcacgctcacttctaagcactttacttatttattctgaaaacagttatataaagtaaccactctaaggctgggtacagtggctcatgcctgtaatcccagcactttgggaggtcaagggggcagatcttctgagctcaggagtccaagaccaacctgggcaacatgttaaaaccctgtctctatcaaaaatacaaaaaattagctgggtgtggtcgtgcacacctgtaatcccagctactcgggagactaaggaacgagaaatgcttgaacctaggagatggaggctgcagtgagtcaagatcatgccactgcactctagcctgggtgacagagtgagaccccatctcaaataaataaataaaaaataaagtagccactctataagtagccatctgtgttacagatggggaaactgaggcacagaatggttaaatatcttgttcaagaccaccagagtaagtggcacagccaggctaggaaccccaagttcccacatggctaagccctctgcaggcagctgtccacccttcaggcctctcttcccaggccttctcccccacagctatctgtgcatatatgggccattctctcatctcctgcctccacctcccacaaagccaaggactttccttgtggcagggaggagggactgtgaaccacacaggagccaggtgggcccgctacgtgctggagggaaagaacgtggtccctcacatttgtgaagttagagagggccactcagctcttgcaaggagatgggaagggcagaaccatctttccaattgatcctggtgggagtcctgggaggtgggtgggatgggaccacgtaagacctggaagtcatcagtcatagtaactaccacttattgagtgtccagcactgattcaagggagttcttgacaaatatctcatttaatcttcataaagctcccttaaagaaagggtaaacattactattcccattttacagatgagaaaactgagtttagagaggctaggtaatttgcccaagttgctaagctgaaatttgaacccaggttttttaacttatttcatcactcaaccaatgttaatatttgcgggagccaggtgctgttctaggtgctgaggacagcagtgagcaaggcaaccaggttcctgccctcatggggcttccattccagcaggaggatgcagggagtaaacaagtaaacaaatgacaatcatcatctcaagtatgacaagtgttatgaagacaatagaagtgggacttatgattgagaatgcctgagaggcctccattccttagcaatacaatggactggacaccctgcagacaaccttccaatacaaaacacctagaaatgccgggtaaaaaaatataacaaacatcttaccacaggtacagtcaagtggcaaaaaattgagggaaatctccaggagtcaaaacaaagaagactgctcctgtcttcacctggactcgagtgaaaatgaaaaagccaccaggcgtggtggcaagtgcctgtagttccagatactgcggaggctgaggtgggaggatctctctctcttttcattaaaaaaaaaaattgtagagatggggtctcactatgtttcccagactagtctgcaactcctggacttaagcaatcttcctaccttggcctccctaagcagtcttcctaccttggcctgccaaagtgttgagattacaagcgtgaaccactgtgcctggccaggagggtcttttgatcccaggtcaaggctgcagtgagttatgatcgcaccactgcactccagcttggatgacacagcaagaccacatctctaaaatgaaatttttttaaagaaaatgtagaccaggtgaggtggctcacacctgtaatcccagcactttgggagactgaggcggatggatcacgaggtcaggagttcgagaccagcctggccaacatggtgaaaccctgtttctactaaaaatacaaaaattagccgggcatagtggtgggtgcctgcagtcccagctactcgggggcctgaggcaggagaactgcttgaacccggcaggcggaggttgcagtgagccaagatcgcgccactgcactgtagcctgggcaacagagcaagactgtctcaaaaacaaacaaacaaaaaacaaaaacaaacaaacaaacaaaaaaaacaaaaccacacatatgaagaaaaagaaactgtagctgggtgcagtggctcatgcctgtaatcccagcactttgggaggccgagacaggcggatcacaaagagtcagcagttcgagaccagcctggccaacatggtgaaaccccgtctctactaaaaatacaaaaattatctgggcatggtggtaggcacctgtagtcccagctactcgggaggctgaggcaggagaatcgcttgaatctagggggcggatgttgcagtgagccaagatcgtgccactttactccagcctgggtgaaagagcaaaactccatctcaaaaaaaaaaaaaaaagaaaaaagaaagaaagaaaaagaaaatataaaagcctctcctgggaattctataaccatcgatctgtcttcatatggggtgggtctcagctgtacaccacccatggagagcagaaaaacccaaggcaataagtgaactaaaacagacctacattggtaacagccttaggattgagataaatacagatcctctctggagagacaaaccttcaatacaggtgtctatgactctcctacataaagctctttgagcctgagcccgcatttcaaaaccacacatcacccaaggaaatacacaaccatgagtgagcgtctgccaaaacagtgagcacccgatggggagcctgtggatttcatattgtggagtcatcaaacagagaaccccaaaaatttgtctatctcccatgtttaaaaaagaaatgacatgagattggtggtcagggaagaggtttggaggaagactcttgagataggacttgaatgaagagatggagccagccatgcaaagagacggagaagagtatcccaggcagaggacacagcaagtgcaaaggccaaggccagactgaacttggcctgttgaagaacagaaggaaaacagtgttctgggcagtgtgggtgattttaagggagggcaatacaggatgagatgccagagataggaaggggcctgaccacagtgataggccctgtaggccccgtgagaggcttttatgggaagtggtgtgggggactttaatcaggaacttgacgtaagttgatctgcatttgtatgtattttattattattattttgagacagagtctctctctgccacccaggctagagtgcagtgacgtgatctcggctcattgcaacctccacccctcaggttcaagtgattctcgtgcctcagcctcccaagtagctgggattacaggcacctgccacaacacccgacctatttttgtatttttagttgagatgggggtctcactgcattggccaggctgttcttgaactcctgacctcaagtgatctgccctcctcagcctcccaaagtgctgggattacaggcatgagccactgcgcccggccattaatctgcattttttaaagggtccctttggtcaccatgtagggatggattgtagggaggaagcatggtggcagggtcccaactattccgatcttctctggaagaagaccctctttgcccagagaggggtccctgaggagtgtgtgtgtgaggtggagattggtagatgggaagagaccattgatcagcgaactcagccagagaggaagaaataagaagctgagcctggttagcccactgtgactcagccccattgcccaaattagtgatttcattgattcactgattcattcagtaaaatgctattgagtgtctcccaaggtgccagattctagggacacactggggctggagggtgagaggcctggtccctgtcctgaaggaatttgcagtcaccgacaatgacaacctgtggggaaagttctgggccagtgggaggggagaggaaaggtgagtgcccattctcagggagggagcagcgtcaggaacagcttctcagacggtgacaggaactgctcctcccctggatctcagggacccagcccatctccagctgaacctccttgtgcccctccctgtagaaaggcagagtgtgagctgggcgcggtggctcacgcctgtaatcccagcactttgggaggccaaggcgggtggggatcacctgaggtcaggagtttgagaccagcctggccaacgtggtaaaaccccatctctactaaaaaaaataaaaaataaaaaattagctgggtgtggtggcacgtacctgtagtcccagctactcgggaggctgaggcaggagaatctcttgaacccggaaggcagaggttgcagtgagccaagattgccccactgcactccagcctgggtgacagagtgagactccatctcaaaaaaaaagaaaggcagagtgtgggtggtcacccctgtcacacagagctcccagctggaaggagaacttctctgtggtgccctgaggaaggaaaagcagagacagcagctgatggaaacagccacaagcctgacatcaggacctcccttcacttccattctcttgtttgatcatcacagcaatctgagggtgtcagcagagtgggcaccaccaccccatgtcacagatgaagaaactgaggatcagcgaagctaagggccttacctaaggcctcacagataaggtgtggctgggcccacaccagaaatgtcctctgttccagtgctgttgagaggaacatccatctgcaggcttcctcccatgcccactgccctcaatcccactcctgcacaggctcaactccccttggccatcagggccctggcagcaggagtggcagtcaagacacggccaggagcagagaatctcagggcagccgtgccagcttcccaggctgggcttcccaacttctccgcaagtttcctgggaagagtcccctggaatggggcaccaggaacgaactttataaaattctccacaaccagccaagcagaacctattttccctcacaatgcaattaacggcaccaacatttacaaaatatgattacaagcgctttggttaagtagaggaaagtatattagatagcagcgaggggttgatcttaatgtgcattttttcgagagacttgcattttctttgtgcaaataaagaggccctaaattctccataggcactaaaatcaatgcagtggaaccatgataacaaacacaggctccactttttgctacatcccccaattaattaagcctttcacgggcatgtaattaggaacattagcaagtcataaaattgccgtgagtctttaaattatgtgctggccctcagcaatttgtttttaattccttctgaagacaatggcactgcggggcccaatagatcttcatagcgcctactgtgctcttcgtaacagccctgccccagctcccctcctggcagctccggtgcctgcatttcagctcccagggcccaggaagtgcctggcagctttgcttctcccttctctctctctctcccacttcaattcctcctcttcttctttccttgtgcttttctctgtctcctttcacctttatttttattctccttttccttggcctcttcctcctcccttaattcatcctccactctttctttttccttcccttcttttctcagcttcctccttccccatcacagttttcctcctcccttcttcctttcttgccccttgacttgctcgtctttgtttttacttcgtcttttttttctatcttcccttgatttctccttttttcctgcgctctttttccttctcctccactgttttcttttctttgtttgagacagggtctcactctgttgcccaggctggagtgcagtggtgcaatcatagctcactggagcctcaaactcctgggttcaagctatcctcgtgcctcagcctcctgagtagctgggaccataggtgtgccccaccacgcctggccaatttttaaaaattatcttgtaggccaggcacggtggctcacgcctgtaatcacagcactttgggaggttgaggtgggcagatcacttgaggccaggagttggagaccagcctggccaacatggtgaaaccctgtctctactaaaactacaaaaattaggccaggcgcagtggctcaggcctgtaatcccagcactttgggaggccgaggcgggcagatcacgaggtcagacgttcgagaccagcctgcccaacatagtgaaaccccgtccctactaaaaatacaaaaaattagccaggcgtggtggcaggcacctgtaatcccagcaattcaggaggctgaggcaggagaatcacttgaacctgggaagtggaggttgcagtgagccgagatcgtgccattgcactccagcctaggcgacagagcgcgactctgtctcaaaaataaataaataaacaaataaacaaacaaacaaactacaaaaattagccaggcatgacggcaggtgcctgtagtcccagctcattgagaggctgaggcatgagaattgcttgaaacaaagagatggaggttgcagtgagccgagatcacatcattatattccagcctgggcaacagagcaagactctgtctcaaaaaaataagtaaataaacaaaaaataaaaattatttggtagagacaaggtctcactgtgttgcccagctgtgttacttgaactcctggcctcagacgatccacccgccttggcttcccaaagcactgggatgacaggcatgagccaccacacctggccctccttcactgttttcttttctctcttcctcctccatcccctcttctttccctgcttcccgcacccccagcacaaggctcctccctgccctcactgtgacccctcaggagtgagccgggcacaggggctgctccccctccctcaccctcccaccagaccccgctcctggctcctggattcccatccacattgtaaagaactagcctgacctgccaccctgacctgccaccctgtgatttgtggcatcagttatatccctagggagccaaaccctgaagcaatctggaggtgtctgaggggatgaggggtcggggtgatgacccctgctcccaccacccttcctcctctgcgggccaagcagaggactgtggtatttgccttgctggccaaatgccctagaaaggatctatgtctgccttgcactcgtctgccagggccctggcacccatgggagtgggagaatcctggccctgactgctatttgtggcccttccaagcctgttgccactggcttcaggcctcaggggaattaagtctttgggctcaggccttctaaacccagccccgcccttgcctcttccacccacatctcccttttctaccatccagaggtttcttttcttttctttttttgagacagagtctcgctctgttggccaggctggagtgcagtggcacgatctcggctcactgcaacctttgcctcccaggttcaagcgattctcctacctcagcctcctgagtagctaggattaaaagcatgtgccacacgccaagctaatttttgtatttttttttaatagggatggggtttcaccatgttggccaggctggtctcgaaatcctgacctcaggtaatccgcccacctcggcctcccaaagtgctgggattacaggcgtgagccaccgcgcctggccccatccagaggtttctaacatgaatcaagatctactggaagatgttgacctgagcctggaatagcacccgtgtctcccactaccagccccattggccaatcaaactgttttccaaggtgtattgaaattttggttagagaaggaccaacttctgtctgggcccctgtccccttccttggtaccaccagtgttccaccccactcctggaggtcacaagacttctgtgaaatctgagagtctccaagttttagagccaggaggaacattacaaaagtgtgtagtggtgcaatcacagctcactgtagccttgaactcctgggttcaagccaccctcctgcctcagcctcctgagtaggtgtctatggaaactcttcttctcagtctcttctcagcttcttctcccagtgaaaaccagctctttctgtacttcccaatggtgataggcattgcaagcactggatgctattttgagttctacttgccttctgcgcacgcaacaagatggtcttctccaccccactgaggttagtcatggcctttgtgttttgtgtgaaccaatgaactgtgagcagaagtggtatgtgtcattccggtggaagtattgaagagccaaggtacaattctccatgtcttctctcggctaccatggaagcacatgttgataggaagatatcttggtggaggtggcctggaatctctgtcatcacatggtggcagcttccctagaaagctgcccagactcacagaagatttttttttaagcaaaaagtagacctttgttgtgttaagccactgaaattttgatgatgtttgtcaccacagcataacctttcctgtcctgactaatccaccaagaaagagcctctgattggtccagcttatctttttgcccaggcttatcctgtgaacttgtttgtttgtttattttctccttgaccattcactgagccagtgtgagggttagctgcctttaggtcagatgcctacactaccccaatcagggaaaacagttcttcaatgtgtaagcttcccctactcaccagaataaatgtaacttaacttcttcttaaatgcaatataacttcttaggttggcctacaaggccctcagtgagcttacgctctctgtctacctctctccaaccacattttcctcttctcccaaccctctttcgcatctcaggccccagagacactgagcttctcttcattcccttatcacatcagctctgtcacaagccatcgctgttccctttgtctaaaacgctgttcctctcacgtctcctcctgaggagatactgattttaaaatgttttaaaatggtattgtgtatatttaaggcctatatcatgatgttataagatacattatctggctgggcaatggggctcatacctgtaatcccagcactttgagaggccaaggcgggcggatcacctgaggtcaggagttcgagaccagcctggccaacatggtgaaaccccatctctactaataatacaaaaattagccgggtgtggtggcgcacgcctataatcccagctacttaggaggctgaggcaggagaattgcttgaacccgggaggtggaggttgcagtgagctgagattatgccactgcactccatcctaggcaacagagccagacttcatctcaaaaaaaaaaaaaaaaaaaaaaaagatgcattatctatctatccagatgtagatgtagagagtaaccattttagcagcatctctgtcgtctttccatctctctcctcaccccaacacattgtctaacaacaacgatgatgagaaggccaatatttattgactgcctaccactgccctgcactgggcgaagcaccattcagagctgatctcttcgaacaatcactattactgtcctattctagatcctccagaacctctatactcgattgcctccctatggtcctgcagaaggtcttagtaatactctgttgaatgactgaatgttgccttcatgaaattactaaatgaataaatgaattctgacttatctgcaaagaagagaccaggaattcatgtaacacatccagaaaaaaactaaagattacctcttccctcattcacataagcctgctttgtaaactgcctaggcagctgtgagcctgtcttcagggagtctggatggtcagggtgtccccagtgaaaaggacacacattccccctcttgctggcacatgcaggcattccctggccctggccaacagcccccttccagccccaaccaggacccactcgcagtctcaacaccaaggcaagtgggtgccccaggagcccagcctggaggcagctgcattccctcaggacagacagctgtgattggaagcctggcgaatggagtctaaccttgagtaagtgttttcttgttgtcatccacagatctaacgcaaagcctgcagagaatgcacgctggagacatatattatacccagagctttttatcttgcacacgtgaccctgcccatcatgagctgtgcgttttattcttgctggtgggacaaaaaccacctcccactgcagcatatatcaagggaaagaatgttgaactttctttgcattaatataaatagctgtttaggcctcattccccagcctgggaccctctgtgcacctgtccttcatctactctatttggcatctggttcaagtttggtttatttagagcccaggtcggcgggcttttacatattaaaggtgcattttaaaagagcattttctattctaatttgggggagccaagctctttagggctttcgggagcggtgtccacctgatttacatttcccccattggagccgagccacagacgcacattagaatgtaaataatagtgatggatacatgtatctttaaagatccattttctctccattttttctttctttgaggggaggggacaggccagggaggaactgaagtattcaggctgtgggggcagaggaaagaaagaggagggagggagatgtgctgggtttcccgggaaggctgcagttcccaggggacggaaggcagcagttcagagggctggggggccagggtctctgcaggaggcaaggccagtccctgctttgtctggggagaggctactggactgcgattgagccggtgttccaatattggctccaggctgggcacggtggctcacgcctgtaatcctagcactttgggagtgggaggcagaggcgggtggatcacttgatgtcaggagttccaaactagcctggccaacatggtgaaaccccatctctactaaaaatattttaaatattagccgagcctggtggtgggcgcctataatcccagctactcaggaggctgagacaggagaatcgcttgaacccaggaggtgggggttgcagtgagtcgagagggcgccattgcactccaacctgggccacaagagtgaaactctgtctcaaaaaaaaattggctccagtgtggctttgggaagttcccttcacctctctgagcccaccaggccaagggatcatagaaatcatcccacacagggtggccatgaggaataagtgaagtgacacctaggaaaccctggcacagtgcttgacccacaacctgtgaggagctttattcatgttggcttttgttctttattgttatccttgtaaatcttgtcttctatcccaagctctggtgccccgcacatggcagacacttgattagtgtatataagctggactcccttcattcaatggcaagaaatttacctgagcctggtgcagtggcacacacctataatctcagttatttggaggctgaggtgggaggattgcttgagcccaggagttcaagactgccgtgagctgtgatcatgccactgcactcagcctggatgacagagcgagactctatctctaaaaaagaaagaaagaaaagaaagaaagaagaaagaaagaaagaaagagagaaagaaagaaagaaagaaaaaaaaaagaaagaaagaaagaaagaagaaagaaagaaagaaaaaagaaagacattaacccagctcctaccgtgggctggaggaagatgatgattcagatatggttcctcacctctacccatctgccactcctgccaaaggcaggacttacccacctcctggtggcctccatctaagccatgctctctcatactttccatgccctaagcccaggacctcctctcccctctgcttcacctgaatagatcccattcagccccattccaggaagcttctccgaccctccgagctgtgtcaggtgccctccctgagggtctggagtgcccattacttcctcccatcacaccgcttaccatcctacatggtaactggtacgtctgtatctcctactaaagtccaagccccaggagaagaggaattgtgtctgttttggtcacctttatatccccagcctggcagatattaggtgctcaatacatgcttgttgaatgaatgaatctctgtataaccaaaccaacacctagcacaaactaggtgctcaatacgtgtttattaaataaaatgatgaagttgatgctttcaaggaattcagtcttatcaggggtcaatgcacatgctgctattttgtgcaaatggagctcagaaggagcagctgggagagtcaggaggacttcctagaggaggtggcaggtcagtagggtcttgaagaataagtagggattgttccagaggaagagggagagatgttgaacagagtggatattttgacaggggagagaccctgaatgggaacaccaagagacagaattctttcctggatcttgggccaggatgctattgttaagcaattcgggatgggattcatctaggatgtgttcaaatgtgggcacgggtagagctaattgtggggagcagggagaggctggagcagtgtggtggggaggtgtctggactcagctgtagctgggaagtgggagagagtgaggagagaatgcccaccccttatccctgaaaggagacccagcttaggtgctcacggccaggcagggaccaggcccggtgcccagagcctctgaggggctgggatagtaaggatggaggaggagatgagatgaaggtgccctcctggcctcgatttccccagcaagaagcttgggctgataggattgcttcagaaatccaaggcagaaagcctagagccatcactcaggagccatggtggggagcagtggtgatgtcagaagcaatgacagtgcagaagggaaaacaagagtggggagaaggaaagagaatcagggaccagaggaccccttgacccagagaaacaggaagttagggtggggggagtgggaaatgggtgttgggacagcagggcaggggtgcagaatagtgggggatgggggagggcctcccagggagggaggttcagagcttggctatagcagtgctgagaggaggaaggtggttaggactctggaggcggagggcagatgaagatgttctttcatcttcttcctggcaagaaggggccaggccgtgatagggagaatgacggaaagtctctttggagctgttggtttgaaagaatttgtctttggaacaagctttttatcagtcagctttaaagatcagcattccttagaggctgctccatcttcctctctctctgtttctctctcgcatcccctccttctcctggtctctctatctcccttcccatctcacggtccctttttcggcaccgcatttgtctgtgtggtttttctgctcctggaaatcccttgccctcttctgcctcactgctcgctgacaacaggccaggccctgctccgtgtctccaggtggccgtggggacagagaggggagagggcaggggcaagactggcagagccaccagtctgtgatctgggctgggctgtgaggccctgggccccagggaggaaaaggggtggggagagctgcaggccatctggtcccttgcccctgccacagcccccctctccaagccaaagtacctttgctcatcacggccaactgcccaggtatggccctcacctgtcacatgtccacagcagagccaggttcgaggagccaagggagagaggctggtgcttacagggtgtcaggctctctcccatgttagccagagaggagtctgggcctcattttccccaggggaaactgaggcatcccactctcatgaggcaagtgagggaagggcagatggaactgatggcgaggagggggctggctagaaggtcagaaggaagccaagccagaaaaagtggggggctgggccaccctccttttccagtccctctcctttctcattagcattttatgttccccaccatcaacggagatagcctgggccttatctcatctcctgccctggctgggatggcctggaggactctcatttcccgcccctgggtgttcaagctgaaaagttaatgatttgtttttcttggaggggataggtctggggggcaggcatggggtcacaggtttccttggagccaccaggagcttccttctttctttctagtccaggaggggcagtgaactagggaggaggggagtccattggtggcctgggtgtcagtcctgagctgcagctccaagaagccccaacccggggccagcaactctaagccatttctgaggtgcctcatcagcaccccaccctccagagcttgggggtgaccctctggggcaccaggctccccccacgccaggcccggctattcctagtgtctggaatgggaggggtctgtgctccgtgagaaacagggagcgagccaggccatgtgtacagagaggcatcaatttcacagggcttgctcctgagtgggtttcacataaaaggattaaagcgagaggaagtgcagaggaaatgggatgttggacaccttgttaaacgggctgtcagggctcccagagcgtgggtgctaactctattccctgtctccacagagagcaggccaggccattacctgagcgatcaaagatagggcgtgtgagtccggagagttctgacagcgcctggaggaccaagagcagggccaggcaggaagatgaggcctggactagccccactgccacctctcaggcctcattcctgaggggttaggggaaatggaggctcaaggcttccgcttacctgtgcctggggagctccttgccctgggattaaatcacagcacgatttgggtgtggggagggaggtgggagggcatttgacctaatgatgtgtagattaccatttccttccttatcttaacaccaagggacattctttttcctgagccccggaattggctcagtttgtgaatgaatctgatgggatcagcacttttcctggagagataagggggttatcagggtggagggaggtcttcctctgggaggagcagcggagagaaggacctgggggtggggggcatgccgtggggagggcccaagtgacctaccaaccgggtagctcagccatctataccgggacccctggccgttcccgctggctgtccctcctctgtctggactgcttcctgcccacttcacccagccaattcttgctcattctttatatttatttatttagttttgagtctcgctctgtcacccaggctggagtgcagtggtgcgatctcactgcaacctctacctccagcaggttcaagcgattctcctgcctcaacctcccaagtagctgggattacaggtgtgcgtcaccatgcccagctaatttttgtatttttagtagagacagggtcttgccatgttggccagactggtctcggactcctgacctcaggtgatccgcccgcctcggcctcccaaagtgctgtgattacaggcgtgagccactgagcctggccaattcctgctaattctttagacacttagccctggctgaatgttgggatcccctgggaaactctacacactttcccaagctaggatccaccgcagaagatgcagccagaatctctgggggctctgggcagagtcttcaaagccctcttacaagtgccccaggaggctttccctaatgcctcaggctgttagagacccaccccctctgttgcctcagctcctgaggtagatctccacaggtcacacctatcacaggacagggtagttttctgcttacctttctgtctagacctctcaccccagactgtgaacgccctgaacttagggccaggggcactcaccattgccccctgggcttaaccctgcactcggtgggctgcgggaggttgggaatgagagcaggtcttaagtcatcttcccatctcctctacctgcagcagaggctgcgtagagctggtcctggtgtgcacattgaatgtgtgatgatcgcatttcatttcaccctctgagatgtgaggatgggaggagagttagcagaggtccctcatcctgcctagtgggggtgcagatggggtttcaggacaactcctcccctgttcccgccccagtgcttttgatttttttatttttaatttttctttttagagacaggatctcactgtgtcacccagactgcagtgaggtgatgcaatcatagctcactgcagcctcggaactccaggctcagcctccgaaagatctggaaatacaggactgagccaccgcactcagccacccactgactttttttttttttttttttttgagatggagtctcactctgtcacccaagctggagtgcaatggtgcaatcttggctcactgcaacctccacctcccaggttcaagtgattctcttcccgtgcctgaggctcccaagtagctgggattacaggtgagcatcaccatgcccagctaatttttgtatttttagtagagacggggtttcaccatgttggccagccaggtctcgaactcctgacctcaagtgatcctcctgtcttggcctcccaaaatgctgagattatagacatgagccactgtgcccggcccacccactgatttttaaatgctttcaacatggggaggtgagagtttagatcagagatcagcaaactttttctgcaaagagccagggtaggccgggcacagtggctcacgcctgtaatcccaacactttgggaggcaaggcggctgaatcacctgaggtcaggagttcaagaccagcctggcaaatatggcgaaaccccgtctctgctgaaaataccaaaactagccaggtgtggtggtatgcacctgtaatcccagctactcgggggactgagataggagaatcgcttgaacctggcaggtggaggttgcagtgagtcaagattgtgccactgcactccagcctgggcgacagagtgagactccattaaaaaaaaaaaacaacaaaaaaaacagagagccagggtagtaaatattttaggattgatgggccataaactctttgtctcaactactcaactctgctgtggttgttcaaaaacagccaaagacgtaacataaatgagtaggcgtggctgtgctccataaatgctttatttatggatgctgaaatctgaatttcatataagtgtcacatgtcacaacatttctcctgttgatttttttcaacctttaaaaaagtcatccttcattcgtggccatatacaaacaggggcaggccacctggagtaggccaatgggccatcatttgcagattcctggattaggtgaagttcccaattccaagcttgcagcccagatctgctctcccccgtcccctccaccccactcactcctgaggttaccagggacctgggccacaccagctgcccctcgataagataaaggtatgtgtgtgaagggacaggaacaagtgagcggaaatcctgatccctccagggatgggggcgggagcgtgaaggctgtgaatttgagagacgtgctgatgagtaatgtggtttcacttcaggtcatttcctgaaagtcagatccactttgcacgtgaggacaagagtgggagcttccgaattcactctcggggcctccaaattaaaagccaaataggatgtagcttttgcctgggctgcatcttcatctgtcaagagcagttatcttcagtgtgccactggggcctgctactgtctgtcattcacccccacccagtgcctgtgggggcatgcacaccccagcagggggaggtatccagtaacgggtccagataccactggttattccaacaaggagggaggtgagattaggggcccctgagggaggacttacccagccaggtctttagaggaacctgccacctctggcccaaacttctagccagtcttgccacttagggcctaggctagactcttggaggttctctctggaaaagggttgggaatgctctacaaaggcccagttatctagagaggaaggaaaatagcagagtctgatgctcagaaactgccagcttccggccttgcaccgtggctcacatctgtaatcccagcactctgggaggcccaggcgggaggattgcttgaagccaggagtttgagaccagcctgggcaatataatgagaccccgtctctataagaaacataaaaaattagccaacgtggtggtgcatgcctgtagtccctgctactcaggaggctaaagcaggaggatcacttgagcccaggaggtcaaggctgcagtaagctaagattgcaccactgcactccattccaggctagagtgagactccatctctaaagaaaaaacaaaaaaaaaacatgcaacaaaactgccagccccagcccctgcggggagagatgggaaagaaggcaggaagacggatggtgactcagagaagacccagaaaggaagggcctctgagtcacatactcagattcctaatctcagcccagaccttgacttgctgtgtgaccttgggccaattgctttgtctctctgagtttaaatgtcctcaacatggagagtcttaccagctttggcccatctcaagcctgtacagtttaaggcccacaggaagcccaagagagcatctcgtaggccccgaatgtcattcctgtgcaagactgaaagtcagtgtgtcccggaagacagcctggacgcagtgtgttctgcagtaggaccactgaactcatgacaccctgttctttccttgctctcccccgcagcagcagtctgggggcctagaagctgagctgacctgtttctttgtcctccttgcccccaaaaactccataggaaaagacactctttgtaatcagaagacttaggttaagactcagctcatcaccagtcacgtgatcgctggcaaatgacctctctgaacttcgggattctcatctataaaatgagtctaacaacatctcattgggctgtggtgacaagttgtcttaggaatgtgaaattgctttgtaaacataacgggccacacctgatatatatttacatttttcccgctactcacagccagtcacagtcgtctcactatgttctaatgccatcctagccatggtgcagagatagaaccagagtggacaaggactctgttgacaccctgccccatccccaccccctgatttgtcaatggtggaagctgcaatgctggactcctagacttgatttattggagaatggggctttcattcccatttgcttcaaccagccccggctgggtccccacaccctgggtggctgagccaggctgggatgtgacctcctagccatgctctctgggccctatggccctggtctatcacctctgctcccacccaaataatccaaggccttgaacctggcctccctgccttgctgtctgagaatcaatggtcccacacctcccaagatgactgagaaggagaacgcttctaccccaccttctcccatgtatgggtgccatgccttctctgtaaaaacaatccaatattgtttgaaaacttataagagcagaatatgctccttagaagacacttaaatacaggaatatataggaaaaagaaaaggaagaaagaaatgtggtctaatatccagaatttacgaggaacttaaacaaatttacaagaaaaaaatcccatcaaaaagtgggcaaaggatatgaacagacacttctcaaaaaaagacatttacgcagccaacaaacatatgaaaaaaagctcaacatcactgatcattagagaaatgcaaatcaaaaccataatgagataccatctctcaccagttagaatggcaatcattaaaaagtcaagaaacaatagatgctggtgaggctgtggagaaataggaatgcttttacactgttggtgggattgtaaattagttcaaccattgtggaagacagtttgtggattcctcaaggatctagaaccagaaataccatttgactcaacaattccattcctgggtacatactcaaaggaatataaatccttctattataaagacacatgcacacctgtgtttactgcagcactatttacaatagcaaaggcatggaaccaacccaaatccctatcaatgacagactggataaagaaaatatggtacctatacaccatggaatactatgcagccataaaaaggaatgagattatcatgtcctttgcagggacatggatgaagctggaatccatcatcctcagcaaactaacacaggaacagaaaaccaaacaccacgtgttctcactcataagtgggagttgaacaatcagaacacatggacacagggaggggaacatcacacatcagggtatgttagggggtgggggatgaggggagagaacttagaggatgggtcaataggtgcagcaaaccaccatggcacatgtatacctacataacaaacctgcatgtcctgtacatgtatcccagaacttgaagtaaaataaaaataaaatgaaagagagagagagagacaaaagagaaggaagaaagaaagaaagaaagaaagaaagaagaaagaaagaaaaagaaagaaaggaagaaagggaaagaaagaaagaaagagaaagaaagaaagaaagaaagaaagaaagaaagaaagaaagaaagaaagaaagaaagaaagaaagaaagaaaaaaggaaggaaggaaggaaggaagaaagagagagacttgctcttggtgttcctttcctctgtgtctgtgcccttctttaggaaaccctgtggacttgcccctactggagcccatgtgactcagcccctccaggctcgtaggcagtcagggcagtgacagtgataggacctccttgtctgtggccctcgtagcaacaagccctgtatacagtgggtgctcaataaatgttgcttggttgaccaggtgagggtgtatttcctgggatgttagtacagttttgctgagagcaagaggaggtagttggttgcccggttcttgtgaggccaggaagatttacataacattaggggttcagaaattaagatttggggcagaatggctagatatcagcaaaataatgatccttttaatgacaagatgaagatgggaactctaaggctctgcttctctgctatggggtggaaagcaatgtctcctttgaatggaatttttttcattcattcatgcagtcagctaatactcactgaattccttctgtgtgtcagcctctgggctcagacatgagcaaggaaggcacccaaagaaaaagtaagaacattttgtctgtcgatggatgaatggataaagaaatgtgagatatagatacagatatagataatattaattggcctttgaaaagaagaaaatcctccctttgcagcaacatgagtaaacctggaggaggttatgccagacacagaaagacaaatactgcacgacctctcttacatgtgaaatctgcaatagtcaaactcatggaaacggaggtaggtggaattgtggttaccagagactagaggaagggggaaatgggagatgtcggtcttggggtataaggtttcagttacatcagatgaataagttctgaagatctaaggtacagcaatgtgactccagtgaaaaatattgtattgtatacttgaaatttgctaagaggataggtcttatgtgttcttaccaccaaaataaaagaaagagaagaaaatggtacctgtgaggtgatggatgtgttagcttgattatggtgaatatttcacaatgtatacatctatcaaatcatcaaattagacacctcaaatatatgctttttttttttttttttttttgagacagtctcactctgttgtccaggctggagtgcagtggtgcgatcttggcttaccgcaacctccgcctcccgggttcaggcaaatctcctgcctcaacctcccaagtagctgggactataggtacgcgccaccgcacctggctaatttttgtatttttagtagaaacgggtttcaccatgatggccaggctggtctcaaactcctgacctcaagtgatctgccttcctcagcctcccaaagtgctgggattacaggtgtaagccattgtgcccagccaaatatatgcaatttttaattgccaacgcatctcactaaaactgggggaaaagaaggatgttttcctggaggaaaaggactggagttgggggaggcggggaggggaagggagggaggtgagaagaggaggagggagctgagtggctgcctgtttccaggaggttgggagaacaatgtggcctgagtcctagatgccctggcagtccacagtgagtgtagggggtgtcctgcctcccatgccctttgctggtctcctacatatggaaacctccctagcaatgggaggagggctggccaggggatccctcagcatcctactccaggtaaaggaagctgtttctctctctgtgcctgcacagcacctgtaaatgccatcatcttagatcaaacttagatcagactagtccccccatacccctaagcaattggtggggactggtttgatttaagttacccatggcgggcctggaggtgggtagggagaggagggaatatagtttaagttaaaacaaaacaaaaccaaaaaacgtttgtggctgagagctctcaactggaacagcctgactggctgggcccaaagccagaagataggtcccaggatcaggtgaccccgccatgcccttgggaaggccctggggggttgaggggttaatgccacttcctccccaggccaccctccagagtcctgccttttcctatcttcctccagcctcatctcccatcaggatccttagtttgaggtctgaagggagggagggcctaggcccaaggacttccagaatggagaggaggtgaaggttcactctacagctaagcctcaatgcctactgcccctaacctccgccaggcagcccatcctggtccaatgccagggcgaggcaccaaggatgcaaagaaggttctgctctgagggagctcagcagggcacaagaactcctcaagggggtgcaattagtgccataggggtgacatctccaggtgctatgcaggcacagagatgcaaacagctctctttacctggaaccagagagaagagggggtattgagaggggtcttgatggttgagtaggagtttgccagacagagaagtggttggagggcgttttcagcagaagcaaagcatgagcacagcacacaggggtgaggaaggctgggtgtaagaaacagtgggctgctgtgcgggagcggagtcagaatgcctggtttgcatccagcattccagttcctccctttctttctctctttctccctttctctccctctttctttctttttctttttttaaatatttatttatttatttatttattttatttttgagatgaagtctcactctgtcacccaggctggagtgcagtggtacaatctccactcactccaacatccacctcccaaattcaagcgattctcctgcttcagcctcccgagtagctgggactacaggcatgtaccaccatgcctggctaatttttgtatttttagtagagacagggtttcaccatgttggccaggatggtctcgatctcctgacttcatgatccacccacctcagcctcccaaagtgctgggattacaggcatgagccactgtgcccagcctgtgtagctatctttagatatgcaaatacttactattgtattacaactgcctacagtattcagtacagtaatgtgctgtactgatttgtagcctaggagcataggctatgccatacggccaaggtgtgtcataggctctaccaggtaggtttgtgtaaacacactctctgatgctcacagagtgatgaaatcgcctaacaatgcatttctcagaacatatccccatcgttaatcaacacacgactgtacatgataaagcacgtagagcagtgcctggcacatagtgagcatttgatcaatgttagctgctatcattattattattatcagagaggtggaggggagtggccacagaacaagctagaaagggaggaggaagcctgcgtaggaagggccttgaacaccgggctcagaagcttggggttgatactgaaagcagcagggaaacgttttttaaatagaagaatgatatagtttacagacagtttactccaggacctggcaaacagcaggcatttaataaatacctcttgagtgaatgaatgaatcaagattggaggaggagagaccaattaggcggccacttcagcgacccaggtatcccatcatgagggctgaacccagggcagctgccatggagttttggggggaccctcagccaggcactgggcttccctgcccacacccacctgcccaccccccgcctaaccaggacaggcagcttcatggtccccgctgctcgtgtgcagcgcacaacaccgcctcataactcactgtgcttatgatgaagcggagcggttgtttgggaagacagccactctgatacccaacagcccccagggccgttcctgatgtttctcttccaccatccactgcttaacatgccaagtctccctcccacaccctgctccccatgcccctccaatggcaccgatctcttcccccattcacacacacccctccgcctgcctctccagtgccgcagcctggaggaaatttattgcagctccagactgctatgggcaaatactaataaaatgctgttttgctgcaatttgtttaattggccacagcagagacgttgtgagcatgtgcagcctctgcccgcgcctgcctgcctgcccgcctgcccagctcacagatgctctctcctccctccgccttgtctccctggctgtggctaccgagaatgggataatgcagagaggagagacaagagcggaggccgaatgagcccatctccatctattcttacagcattttactgagtgaacctttcacccatgaaccttgggatcctgtgaacagccagactgcctgggttcaaatcccactacttatttcctcctcttactggtgtcaccttaggcaagtcatgcaacctctctgtgccccagtttcctcacctgtaaaatggaaacaatagcaacactgttgtgaggattaaatgagctacttcatgtaaaacactcagaacagtgcttggtccatgggaggcgcaaaatcaatgtgaaggacttggactgcttgggttctaatcccagctcggccacttagcagctgtgtgccttgggcatgttacttaagcacttcgtagctccgttttcccatctgtgaaatgggggtagtgattacatctatctcacagagttgcgtgaagattaaaggtgtcaatcaacagaaagggactgagaacagagcctgccacgaaataagagctgcaaaagcatgaaccgttgttgcgaaacagacagtggcagcggcgggagctaagtgctctgggtgggggtgctcgggaagactttgcaccccgcgttccttctctggagtgagttatgggggaggggtgagtccccagagatgggaattcccaatggtaaacagttcgagctggttccttgtgtcttgaggccagcgaaagaccctcgcagtgtgtctctcgtgggttaggaggtgcagtgaccctgctacagctccccagacagagcctggggctgtgctgctgcttgtggggtcagctcaacctcccagctgctcccctcttggcccctggcacccactccccgggggtgggcatcttgccacccgccagatggcactagcagaggctggggcgtgggggtgggtggggagcgttaggccaggctgcaggagctgggcacaggggtcttgggacagatgggcttgtgtctgtcccgagaatagcatgcctggggcagggcggaggcatccccatgaggcttttgggagctggctgaggcctataagatacagtgcacacgagcattcatacatttacacacactcacgcacaaaaatgtgcggcatgtttccggcaaccttgactcagctggctcaggcacctttgtccaaaggaaactcaccactcctaaagaaaccttgcaccctgacctctaggtcatgaatgctagagcgtgccacaggtaacaggaggcacttataccacttccactccgagctttgcttccctcatccgcaaaatgtggagacagcttccctgtctcctggggaggaggtcagtggcataggcctgagaagaacaccctgaagccagctggccaagtttggattcaggcttttctcctggggattcaactgtgtgcccttgggcaaataacttcacctctccgtgtctcactttcattatccataaaatgggaatgaagacaatagcacatacctcagagaggtgtcatgagagttagaaaggagctaatgccatgagtgcaggaaacgggcgtggaaacggggcctggcaccgcaggcgtgccctctccctgggccacttcatgactgctgcccagcggcagttcctgttgctgtgctggactctctgacggccaagtgtggggacttgtctcttccctggcacatggtagcattccgcaaatgcttcttggcttgttggcaggatgggtgtcctgtgcgggggtcccggcctgctagggtgggtaggttgctgggaagctcccccagccgaccctcggaggcccgccctgccgcttcatctagaatggtaccgtctgcagccacaggcaatcccatgctatccctgcagccctgggccaggtgctctgagcctccctcctctgtactctacccacaaatcgaagcccgccctgcctctcactgctccccttcccaattcaggcataatctcccccaagcagggctttaatcccgcctcccccacctgcagcctctcccacaatgccctgagctgctcagtgaagtgcatatatcctcgctgtactttctaggctcttccctgcaaggtgagggccttcccaaagcagcctatcttccattgaacggaagagaaaaccgaggccccagaagggagaacgctgctgcctctcaccgtcctgaggggagcagccaggagagctggggctcagggtgtccaacaaggaagggaccatgtaagtcgggggctggcactgaacacctacatcctgcccccacccatgaatggccccacattctgttgaccctcttccaatcttgggcattcaatggagcaggggggtcggggtcggggagtggggttgggggtggaggaatgagggaggtgggatggtggggggcagagcgtgccctccctggctcggtgaggccgatgcagccagctgtggcgagcagcagctggatacacataccaggatgcacggtcccacgccctctgccagggcccagcagtcaggggagagggaggccagggaaggcagtgaagtggctggtgaggctcccaggaggggggtgggaagaaggggaggcctggggaatgctccgccggccccagggccccaagtttcccccagaaggcctctggtactcctcaccctgactccaccaggaggtggagtgacttcagagtttccgtagaggaaggcccaagccggagccttgttgcccactccatctctggggagcgggctgcactgtggtcacaggagggtggtaggagtggacagggtagccacaggccccaggactgggaggggaagatcatcgttcagaaccacccaggaaacccaggggcagaggcgtgggctccatgcgctctgttccccagcaccagggactctctgtttgagttcctttgaggggttaaaggaatcaggaaagagaggcgatgtcaagcacgtgctccttcccaaacactaactgagaagcagcctcagtgaacagcagcacagcccttgcctgcatgaaacctggagtttaatggaagagacagaggacaggcacttccccatccgtgttttcggggccataataggttcgtgcaaaagctggcttggacaagtgggcacctacctcagtaggggataggggaggcttcctggaggaggtgatgccaagcgagaccaggaagaggaggaggagccggccagtgaggggagcccgggcagggaggactgttcctcccgctgacagaacagcacgtgccatgacccagggcaaggtgtgggggtcattttgaagaacccagagttcagagtggccaagagcaccagcagaaaggctggagaggtgggctaggaccaggtcataggagagttatgacccaggagcatttatttattttattattatttttttgagacagagtcttgctctgtcgcccaggctggagtgtagtggtacaatctcagctcactgcaacccccacttcccaggttcaagtgagtcttgtgcctcagcctccggggtagctgggattacatgcatgcaccaccacacccagctaatttttttgtattttaagtagagatggggtttcaccatgttgcccaggctggtctcgagcttctggcctcaaatgatccacccgcctcagcctcccaaaactctgggattacaggctcacaccaccgtgcctggccgacccaggaacatttaagtagtggaggaacaagctgaagtttgcattttcagatcactcttattgcaactggagagtagaccagaggcaaggaggccaatcaggaggcagggaggccaatcaggaggctggtggagtagtccagggtgtgcagctggtggcctgaccaaaaagaagtatttcagatgcagaactgatgggagctggaaatgactggttggtggagtgagagaggagaggagaaggtggagtgagagaggaggagtggctgtggtgccagtcactaacatgtaggatgccagggttggccaatggggctgggccaggccttgggtttaaccttggccctctagagtgtaaggagccagctcctcccgtgtccctgaccctatgcctcctccccagctgatgtgccaagcaccaggtccaagcgtgtgcattcgctcgccaaaccccctcagtgtggcagcagggcagggagaacacggaaacctctagccacctggttcttgccctctgagctcttccagtcagtaaaggaggtgggccgtgtgcacaaacaacagccacacgaggtctgatctgtccaagtccgaactttattgcttttgaccacaggctgtttgcaagggcagtaaatgattaagggccacatgagtggtagggactgtaattgcctcagagagtctgaggaatgggaaagcccttctggatgtacagaagagaattctggtcagggcttgggggtggagagggacagggctgcaggcagactgggagctgggagactgggttcaaagtccaagctatgctccaacttggctgactggccaaggactgtatctctccgggtctctgtttcctcatctgtaaaatgggggaaaagataaagcttaattaaactcccagtctccaagtctggcgtgggattgtagagtgaatggacacaaacagtctctgagaatgtatgtgccactcctttgaaagggactggggtccactctgctcaggtcataggatttgttttggaaggccagcgtttttagagttaggcacaccagagttcaaatcctggctctgccatttactggctgggtgcctttagccaagtgacacgacctgtccaggactcgttgtctgtagaatgggatggctccccccgcacacagggtaaataagattactgacctccattggcatgggcatgacaccgaatctctcgggcaagttcacaccagccccaaatgccccagggtaaggaagcctgggcctgaggcctgcggggaccttggccattcttcaccacaaatcttcccagctgcacaagaggtcctcattgcccacctccctccccatcctaaagcttcccactgactctgccgagtgggggagtggggccaaatctcccgctgctccccctctggcccagataacacacacaccaatggggaccctggcctgcggaaactgcccagataaacactgcctgcctcagataaccgaggccctatcggcttggcatcttgttctccaaaccacaggcgctggtgataaagggattgtgtagggggctgcatctgctggggcccaggtgggagccttttgcaggttttttggtttttgtttttcttcctctcactattatttacaacaaatgtttggccccttcagggacaagccagtcctctggcagccagggtctcccaactagctccccctccctctctcatcaaaaaccagacggccatttgtcccccctgatggatttccaagggagggagaggaaggcattggagatgggattagggggtggcagacaggcaaattctgttcagagcttttggtgattataaaaagcttgggagggagggttgctccttcagggacatctgatactaaccaccatttattgagcacttactatgtatgaggtgcagcttatttgatccagtgggagtgctaaccatccccttcatttccattttacaggcaagacaactgaggttcagaaggtcacgatacaactggtaagaaagactagaatcaaaggccaggtttgaagcaaagcctctgctcttgccctctgcaccctgttcccaagggccgcccctgcttctggccctttctggggcatggaaaggaaacaggtggctgctctcctaggcacagaaaagtctgagccacacctggaagctggctttgggccagagctgggatgctgggccgggaacctgggcccggaggggtcttgctggctccctggctctagggttgtcacatcctgggtggccttggaggtcatctggagcaaaggtctcctgggacagacagggaaacagatgaaaatagacgtgtgacaggcctgggatcagccagccagtgggtgctgcttgaagaccttggctccgggcgatcccagctcactgattttacagatgaggaaactgaggcccggagcaggaaaacgacttgccaaaaggctacatagctaaagccagtagagctgacactcgggaggctgaggcagaaggatcccttgagcccagaggttcgaggccaacatgggaggctctcttaaaaaaaattaaaataaagttaagctaggaatccaacccaggcatcctgacttgcagtgcagggctattttcactctcccatattagacatacaccaccagatacagacacagaaaaccacagccacagaggctcaggcacaaggggccacccggggggcacaagacatgtgcacacttccaagtatacgtgctcacacctggcactcccacgacaccgtgtgggacccgctgtccatccccccaccccgggacctgaaggagacccagctggacttactctcccctcccctgcccctctccccccacctctagaacagcaccaagccagggagctccacgctgtgcttaaaaagggcacttaatttttcattcttaaatgctgggatgctcttgtcttccagcttcgcccaaaccccttggtggagatggatggaggcgcggaacacagttatcagaaagattaagccaggacttgtcatttttttatatcacagagcagtcagctcgacgagtgatgtcctccagtccgccaggatgagtccagaacctttagtgccagtagtaaaaaagactataaaaaacaccatcggagaaagggtaatgatgaaatttaactgctcccgatcacacacctggggtctgctcgccgtggaaccggggggttcggccacatcatcctttactgctgtgtccttgtctgtgcatttaaggtccttccactgaaccagaacacacgttcatggtggggagcctggggctgtctgccccaccccaccctgcatggtgcagagcacagacagtgggagggagcagggcagactctgtcctaggaggccttgaggcctgttgggcctggaaaaggggccgtagggctggataccccaggagtgttgctgagctgcagggttacagaggagctccagccacagggctactgaaaacagcatggggctagactgtggttggctagaatcttccttccttccatttacccttccttccttcctccctccctccctcccttccttccttcctcccttcctccctcccccccctttccttcctccctcccccccctttccttcctccctcccctcctccctcctttccttccttccttccctccctccatctcactttatgtgccaggtactgtgttacctacatgattgtcacctgaatattctcactgctcttagaatacagcactctgcttacctaatttctagccatgtctccccaccccagcccctcctgtcccatgaccccataccactctgcccactcgaccctcccagtgctctattctagctgtattgaaacattcaaagtaatttgctctctccagcctctgggctttcacgcatgctgttccctctgcctggaacccccgtctggctaacccctactcattagcaggtcaaagccgcagcttcctccgggaagccctccctgacattctccaatcagctcccttgccaagagctccctgcatctcccctttgttgtacgtttcatcacagtatattgtcactgttggtttaattgtaaggcgcgtgaaggcccctgttgaggacactattctgggtctgggaagttagcaatgaacaaaacagacaaaatccctggccatcgtgaagcttatatcccagtgaagcggggcagacgaggaccatctgtctctttcaacctttgtggacatgtcactaaaggtatggctgagtttaaacctgaaaaggggccaggtgcagtggctcacacttgtaatcccagctctttgggaggccaaggcaggtggatcacttgagcccagaccagcctgcacaacatgatgaaactccatctctacaaaaaaatacaaaaaaaaaaaattagctgggcatagtggcataagcccatagtcccagctactcgggaggctgagaggcgaggatcgcttgagcctgggaggttgagactacagtgagttgagatcgtgccactgcactgtagcctggacaacagagcaagaccctgtctcaaaaaaaaaaaaaaaaaaaaaaggccaggcacggtgcctcacacctgtaatcccagcactttgggaggccaagtcaagtgatcacttgagctcaggggttcaacaccagcctgggcaacatagtgaaatcccatctctaccaaaaatacaaaaagtagccaggcatggtggtgcacgcctgtggtcccagctactcaggatgccgaggtgggagggtggctggagcttggaaagcggaggctgcagtgagctgagattgcaccactgcactccaacctgagtgacagagggagatccagtctcaagaaaaagcctgaaaaggacttttgaggtaggtgggattaccctccctgtgcaacagagagccctcaggtcactggttagggaatagcaggaccagggttcaaaccaaggccagatgggccccctagcttgagcttcctccttgctcagcctgcctggcctcactggcccctttgctattcctaacatgccacgcatgctctcttgtccaagtctttgaacatgcatttccctctgcctggaatactcttcctgctgacaaccttaggctccccccggtctccttcaagtctttgctcaaatgtcattttcttaataaagtcttccctgacacaactccacacacacgctcctatgcacctcatattctatatgttacctgtttcattttgtctacctttactagagtgttggttccctaagggcagagcttttgtcttttctgttcgttgtcacatcaccagtgcctatcataggtgctcagtaaatatttgctgggtgaactgatggacacaagaaacacagagctgaatcaggacgggtccctgccttgaaaggcctgagtctggccaagggagacagtcattgtcatctgagtgaatcatgttctaacacagcagacttcctcctatccttgtccccttaccacctcaggacacagccctctcccaagactcagtctttctctggcactcagattgtctgtctatgggcagagagtgccccgatcggccccagggagggtgagctgggaggggcagggtgagcgggacccacagtggctgacctggcacagccggcacggtctcagttctggagcagccctggggggacctggggagaggaagggcagcagagttcaggaaacagagccccagccccagcctgctgatggcatcggctcctgtccccacagtgcctgtaaaaggccattcctcaggacccaggagtcccaaatgccagtccaaaactccacacctgacccaccaagggaccttgagcaagtcaccttccgtccctgagtcccagtgttttctcccctacggattagaactggccaggcaaggtggctcatgtctgtaatcccagcgctttgggaggtgggcagatcacctgaggtcaggagttcaagaccaacctggccaacatggtgaaaccccgtctctacaaaaaatacaaaaattagccaggcatgatggcaggtgcctgtaattccagctacttgagaggctaaggcaggaaagtcacttgaacccaggaggtggaggttgcagtgagccgagatcatgccattgcactccagtctgggcgacagagctacactctgtctccaaaacaacaacaacaacaaccaccaccaccaccacctacacagatggctccaaaccttttcaaggataaggacccctctttagaattttttactgaagcatcataaacacacacagtgatttttcacaaagttcatcagcatcttgaccaagaaataaaacatcactgactcccaagaagtccccttacggcccttcccagtccctacttccccaaaaggtaaagattgtcctgatggttaacactagattgtttcccctgttttctgaaccttgaggctcccttcgtaactctacaaaatgttcttttgattttagcccccaagatgatgctcaccagctggagttcgcacccatgttaattccctcccacatcgaatcagggtgatctttgtgaccagtaaagtatggcagaggtgacagtatatggcttctgaggctaagtcatcaatggcaggtggcttctgccttgctctattggatcacagctctcagagagctgggtgccctggtatgagccatcctatggagcgctccacacaaaaaggaactgaggcctcccaccggcagcaggtggcaacatgccaaccacacaagtgtgccatcttggaagcagatcttccagccctggtcaggccttcagatgactgcagtttccgccaacatatgactgtaacgtcacaggagaccctaagccagagctgctggccaagctactcctgaattccagacccatggaaactgtgagaaatagtaaatatttattgttgttttaagctactaagttttgggataatttgttacacagtaatagataagtactacagtattcattgattgagcaatactcaatgaaccaagcccctttggcgttcagtcagcctttaaaggaattcatttttaaaattatctgaatagtatcaactcacacttgaataaaggactttcattttggtccttttgacaaagacatcgttcaggctaaggactggcaataactccaatgtccctgcaggatctgaggccccaagttcgggccagagtgtggaattaatgttgactcagttgacctctaaagctctttttatacgaaaaccctggactcagagactttcagggacctgtttgccagtcctcgctccttccatatggttggtcaatagaatatgatagtgaggaacccaggctttggggtcaagcaggtctgtgttcaaagcctggctcctcctcttcccaatctatgtgacctcctcaaacaagtagcttcaaataagtatgctctgaatctcagtttcctcatcagaaaaattggagaagagacgcctggctcctaggcgtcgtatgaagaggaaataacacatagcttgtccttgtgatgaggcagctgtgctgatcatcagaccacagactggctgggcactctcagaggtattgggagactgttcccctctcacccggcctgccctgcgggtggctgcacccctcctttgtgagtttgaagggccaggtgagcatatggccacatggcaggacttggatggagtgaagcctgcttcctctccctcgttagcatcgcccggggacctgctctctccttagcaaaggcctggataacgaaggccacagcctattaattgcggtgacagtgataaaggaagagggggaggctgctatttgtcttgcccgtaacctctcgcatcattccaagatgaatgaaaactcattttctgctttgattcagtctaatttctctgggccccctgggcctcatggggggaagggactcacagcccttgctgaggaggaatcgcagggaggaggagaaagggtcagaggtcacagagggaggagggtgggctccactggggaaccaagatcttggtgggggcagtgattagagcattcagtcattaagtggatggcgggctggggcttacacaggtgctggctaagggcattcacaaactaatctggtgaagaggtgaatgtgctacccacttcacagatgagacaatggtggcacttgggagaaaatggctagcacaaggtcacacagcgagtgagggccaacatccagcttcagcagggaggagaggctggccagggccctcgctggctctttcccagtcagtcagtcactcacagcatggtgtcccacctggatgaatgacttcatcggcacagaagtcccatggacgggaaaggaccatccagcagggaagctgccagcctacctgtcctttctccctcggggactggaaaaggagaggggccaggggatggggaatggacctttttggccatcaaggaacaaagactcgccaagtagggccttgttggaattgccattttctctgctgtaagatggagccaacagtccccgcctcccaggaccacatggtggctggagagggcaggtgatgggcatgtgtgtgagggtacttcacacccactacttcctctccgtcgaaagggagaagcaaagcagtcgtccccagatatttgacctgctttgtcctaggttaaccatctccgggggtcagtctgcccctgagtccctgcacctgcctgtcctgatctatcacctgggtcccctttgatggtccagaggtccccttaccacctcaggacacagccttctcctaagactcagcctttttctgacacccaggccatcagcctgtgggcagagagtgccccagtcggccccagggagggtgagctgggaggggcaagatgagcgggacccacagtggctgacctggcacagccagcacggtctcagttctagagcagccccaggggagctggggagaggaggggcaagagactcaggacccagagagtgggaagggcctgggtctgtgatttccctgctaaagtggcctagcagccccaggggagccgcatggactgtgaagaaggtgggagatacccccaggccagctgcaggttcacaggagaaactcggctacgtgtgtccaatgcgcttcacacaacatcctcccgggtctttgggccacaaggtggaggcgctgtaactgggaggaattttgtgatggtgcaatgcatgagtcagcatgggctctagagcccggcagcctgacgtgagctgcagctctgctgtgtgaccttgggtacgttgctttgcctctctggacttcactttcgctatctgtaaaataatcttcctcatatggttatcagttcacttatgtaaagcacttagagcatgtgtctaagtgggctgggacagacctgagcctgggttgtgctctgaggggctgcagccaggctaggaagggctggcggaggatgtgcgtgagaagtaaagcagctgactccactcgtgtccccctcgccccccaccaatctatggcatcctcccatctgccccagatctgaattgcaaatgaccttcctttccccaccactccagctggagacagctgagtccaaagaagatgtgtgcctgcccctgtagggtgccctagccttgctctgtctcaaagggtctgcaggcggagcccttagaccagggcccctttccaggatcctgagagagtaggcaaggcccagttagagccacctagcctggcattcaaggccttcacagcctggcctcaccttctttctctgctcccatgtccatccccatcccctatcacccatcccacccacttctccataggctcagccaaagtcccatgctaatgtagggaaggtggatgatcttcgctgagtgcttacaggtgcttacagcactgggcgctgtattacaagcatcagcttggatacacctcctacaactccatgaggcatgtactgttgagaattccattctacagatggagggactgagactcagagaggttacatacctctagcaggtggcagagctgggacacagacacacaatcacatcttgctccctccagaacccagctcttaaccattactctgttctgccatgaagcagatcctgcataaaatatataggagaaatgaagtcagggagccaggacctgtaatgaaggaataaaaggagcttctagaggtagtcattcatccactgatttgatatttaccaagcatctactagatgctgagcactcagagataattataatgatgatgagaataacatcaatggtagtaacattagtgatagtggtaagataaaaactattgctgacatcttctgagctcctacaatgtgtttggcactgtgctaggtcttctgttgcagaactctaatccttacagcagccctgcaagacagttattattattattatcgccactttatagatgagtccactgaggctcagagagcctgtatctaaattcacttagatttcaagcatctgagcaagaatttgaacccccagactgtctttgaataacaacaacactcatgagactgtctagcatttattggatactttccagacagtctgctaagcacttaaaatgatcatgtaagccaggtgtcattatcatctctgtcttagtgatgaggagactgtggcttggaggtcaagtaaactgctcaaggtaatgggctgaggacacagtgcagccaggatttgaagccaggtccaccaatctgctcccatctccatccccatcccctacctcccaccccacccttttctccataggctcagcctaagtcctatactaatgtagggaaggtagaagtcttctatttccccacaatgcccctcaaggaaagggctgtctagagtaagcagtttaagtacaaggactctattctctctcttctgggctaatgcaactgcctcctactgggacttctctagttgcttctcctccaaaccttcgttcatagtccgttgttactctactgacagaggtcctgtcctaaaactcaaccggtggcagaggcagctaactgtgcaccaaaagttcatgctgcacctttcaaagggggcatatatcactggagggcaccaccctgccaggtcctacatttcccagagccctttgcaactgcttgaggccgtgtaattacttctcgcgggtggaatgcaggcagaagtgatgtgtgttgcttctgggccaagtgattaagaagcaactgtaccttctccaccctctctctttccttgtccaccagctggaagtgggggattccaagaccttccaagattcctcactcttaggggtgttgtggactgaagtttgtgcctccccccaaaaaattgatatttgtaattaatattcataatcaaattcaaaattcctatgttgaaatcctaacccaatgtgatagtatctggaggcgggccctttgagaggtaattatgggtagatatcaggtcatgagggtgaggccctcatgaacgggaatattgcccttatgaaaagaggagacacagtctcccctgtcccactctgctctctgcgtgtgaggatacaatgagaagacagctgtctgcaaaccaggaaatgggcccttaacagacaccagatccacagcagcttgatcttggacttcccagcccccagaactatcagaaataaatgtttgttgtttaagtcacccagtctatctagggttggttgttatcacagcccaaattgactaagacgggggtgtaaggaggctggtgcgtcctgaatcaccatgtggaagaagtgacccagcaatctggagcacccatattggactgctgtgtaagtaagaaggacaccttttgggggaagccactgaaatttggcggtttacttattacagcagccaggcttacctaaagaataatatattcactcctggttcataattttttttctttttttttaagacagagtctcactctgtcacccaggatggaatggagtggcaatcttggctcactgcaacctccatgtcctgggttcaagtgattctcatgcctcagcctcccaagttgctggggctaacaggcatgcaccatcacacccagctaattctttttatttttagtagagacagggttgtgccatgttggccaggctgatctcaaactcctgacctcaggtgatcagcccacttcggcctcccaaagtgctgggattacaggcatgagccactgcagccggccctggttcatacttctaaatgggctcatccttctaaatggtttcctccatctgaagaataaagcttaaactcctggccaaggtctataagacctttcacaatctgggttccgccacctttccagtcccatctcccacccccacctttaaaaagaaaatgtgttcaatcacagaactgctctattccctgacacagcatggtcttcatactcgtgggtgtttacatggctgaccctctgtctggaacactatcccgctcttctctttagaaaatgttgattcagctttcaagacccgttttccatattacctcctcactgaaatcttccctttctgtagcagaggacgttgcacccacagaaacctccacagatgcacttatcagagtgcattgtaattatttgttcctatatctgattgtctgaccagactgtggagtcctctggggctggacttgtggcccatcaagttttgtatcaccagtgccttacaacatagaaagtgcccagcaaagacatggatttatggataaactggtaaacaaccaaaaagtctaaagtctatgccccaagttctgcagggcttagcctcaggcataaatccctccacagagatgaaactgggaagtctgtttcctgcccttcaaagacaaagtgagtcctggcgcagtggctcacacctgtaatcccagcactttgggaggccaagataggcggatcacttgaggccaggagttcaagaccagcctggccaacatggtgaaaccctgtctgtactaaaaaaaaaaaatagaaaaattagtcaggcatggtgatgggtgcatgtaatcccagctacttgggaggctaaggcacaagaatcgcttgaacccaggaggcggaagttgcagtgagccaagatcgtgccattgcactccagcctaagtgacagagcaagactctgtctcaaaaaaacaaaacaaaacaaaacaaaaaaaataaagtaatacaagcccagggccccagagggagaagcaatcctgtgtcctctcttgtctaaagtccctgaaaattcctcccatggcctgaacccagatgaccccttagggctcattcttaagacaggggagaggattgaggagaaatgacaggttctagacttaagctgattcattcacctgcttcaaggcctactgagagcagaaggcctggcctcagcctcctcctgaataatcatgggccgtctccagggttaaacaggcctgggttcgagtcctggtcctgccattactcatgggacttggacatgttgatcatatccctgtttgaaaataggaaaataccactctcagggtggttgtgaagacctacaacatttcttattggttaggtcttacattttctaacctaaggatgggcctcccagccaggacctgggatccagggcatcacagtcccaggacatcctgtcctcctccctcctatccccacctccaccgctgctgaggccctctgtctccccaagaatctcagctgcttctgcaatgagttcacactggatttttttttctttcaccaagttgtgagtggggacatagctgagacacttggggtttcaagtaaagaaagagtctgatgggtgcagcacaccaacagggcgcatgtatacatatgtaacaaacctgcacgttgtgcacatgtaccctaaaacttaaagtataataataataaaatataaaataaagagtctgagacttggagagatagggaagggatggaatgacaaggaaagaaaggaaacaaaggtaagacaggaaaatttaaaaacagagctggccaggcagggtggctcacacctgtaaacccggcactttggcaggccaaggagggcagactgcttgagcccaggagtttgagaccaacatttagccgggcatggtggcacatgcctgtattcccagctactcccagctaaggtgggaagattgcttgagcccaggaggttgaggctacagtgagttgtgatcatgtcactgcactccaggctgggcgatagagcaagaccctgtctcaaaacaacaacaaccacaaacagaaccaaagaccaagacactaaggaacacaacagagacagaaagatgaagacaaaacagagaaaaagcaagaaagagagaagcagaagtggaaaggtgcagccatggagaaagtgagtcagaggggaaggggagggggccgttgacaagccgggcaaggacagggacaaagtgaaggcccctcggcccccagctgagcacggctttcagcctcagagggttctgctgctgagaaagcaaagtctcttctccctcattcgaatgaatttgatattcaatcaatgaagattaactcgcccaaggtaaaggggtttttccatctgtaaggaagtcgaagacaattatgcagatgagaaaattaccctgagatgaggagcctcttgtatatgataattatgtgaagggtggactcccacactgattagcatatctccaagaccagacccagatggaggaggcaggaggagcagaggtcaccaggaatccccctcagagaggtgggttggagatgtcccagccccagtggtcgtctttggagaagaggacacgtcgccaccatcagtaaagactaactggagccttgttcccacagtgtccatcgaagctgcctgggccagagcagggccgatcaagctttaatatgagtatgaagccctggagatcctcctcagatgcaggctctgatctggggggtctgggtgagattctgcctttttttttttttttgagacaaagtttcactcctattgccccggctagagtataatggcacagtcttggctcactgcaacctctgcctcccaggttcaagcgattctcatgcctcagcctcccaagtagctgggattacaggtgcctgccaccacactcggctaatttttgtattttaagtagagatggtttttcaccatgttggccaggctggtctcgaatcctgacctcaggtgatcctcccaaagtgctgggattacaggcatgagccaccgcacctggttttttttttttttttttttttttttctgagacggagtctcgctctgtcgcccaggttggagtgcagtggcacaatcttggctcactgcaacctccacctcccaggttcaagcaactctcctgccttagcctcccgagtagctgggactacaggtgcccgcaaccatgcccggctaattttttgtatttttagtagagacaggatttcactgtgttagccaggatggtctcaatctcctgacctcgtgatctacccgcctcggcctcccaaagtgctgggattacaggcgtaagccaccgcacccggccaggttctgcatttctaagaagctcccagctgatgccaatgctgccagtccacaggccacactttagaggtcctggctctgtggttctcacctctggttgcaccctagtcgcctggggagcataaaaagcagaccaatgcctggggctcactccaaaccaattcaattagaacctttgcaagaacagcctgaacactggaattttttttttttttttttttggtgaaaaaaacaacgattctaatgtacagccaggaatgagagcccctgacttgaatggtggctggaatcctgagaagtccatggatctattccaagtctccagggacactcaggccctaagaccctcagaagccagaggcctgggccggagccagggcaagggctatggaagaggcagggaagagcaaaaaaatggactgagtaacccagcttgggaatggactgaagacaccgcactgggtgtgctggggagccttgaaccacaaaaaccagctatgatgtgtgaaatacccgctgtggactaagccctgcacatgtattctctgtgactcttaaatggggttatttttaatcccaatttgacagatgaggaagttaggctcagagaggcaaagtgatttccccaaggttgtagagttgggatttgaatccagctgggtctgacccccaaagctcaggccattgcctcccacccactggggaggggccctgggggtaagcttatccaaggaagttagtggctggccctggaccctaaggcctgactgagctagagggtccctccggcctgctatgccagaggaaggccggcctcacgtgatggaggggagtgagcaagggcttggaagtcaaacagccttgggttcaaatcctggcttttatgagccttgtaacctcaagcaagtcattgcccttgctgagcatctgacgggctcctccttggccaatagggatgataggaccaacttcacagggttgctgggagaaggagatgaggtcaggtgtctcatgtgtgtgccatggagtttgggcagggttttcctcttctgagggaatggaggttggctgagccaaggctcaaaggctctaggactcatcagagcccgcccacctcttcggggctttggcagggttgccacaggctcctcctctactctgatgcaacactgatgggaacctagggctttccaaatgatgcaccgggcctgggtccaagcctgtctgagtctggtctggactcatcagcaatatcctaccatacagacagcattgagtgtggcccctctgcctgggataccttggggcatgagccccagcatctctcccatagcagatgccccattacccgttggtgggcaggggtggggagctctataaagaaaggcagtgggcttggaatcttccggcactagccagccttcctgtcctctcccaggaattccccttggagaaccatcctgtctccacggctgctgagtaagggtgtaccccacacacgtggcccttgtccactcaccaaagtgtgcactctgcctggaaggggcttctttagttaattgccgtgaaagcaccctgtgtggcatcagggaggaacttgccttctgagggcctcagtctccagctctgtaaaatggggacagtaaggggtgctcagtgaaggttcaagaccttctccctctgaacacacaacctctcctcaccaccaaccccacccccagcacccttttggctaccattcactcaaacaaacagaaaccaggggctggggtgtactgactcagaggtggggggcgccccagtcctcaccctgtgtttctatttccatattgttccccacaatcttcccctcctagccaggccaatggaggatgaggatgaggagagaaagaagggaaaagaaaagggggctacagaggtggaagctgggagctgcacccatgcccccatgtctctgtgaatgcgtttctctgttttctgtatctgtgactctgtcctgtctccgtccctccctccctccctctctctctctctgtccatggatgtgttggtgtacttgtctgggcatctgcgtgtgtgtagaaatgtatcactgtaacttcgtgcctgtgcatgctgtagttgtgtgtgtctcccgctctgtgtgtgtgtgggtgtgtgaacccctgtctctgcacggatgtgtgtatagctctgaatgtgtgtgtgtgaagcaggggattgtgtctgtgtacatgtgtgtctggactggagtctatcgggtgtgtatgtttgaacatgtgtatgatagcatctatgggtgtatctgagtgtgtgtctgcgtgggtgcatatcaatggtgtatgaagatctgagtgtgtctaggttagtgtgtatcagtgtggaggggtgagtgcctgggaagggatgagtcagaagtaggtatgtgtatctgcatgcacctatgtgggtgtgtgacagcgtgtgtgggtgtctaggtgtatcagcatctgggagagaggggttatcagcatggagggtgagtgtgtgcatatgattgtgtctatcttctcagtatatgggatgtggggtgtgtttgtgtatctgtgtctgggaggagtgtgttggtgcggggggatgtgtatcctatgtgagacttgtgagcgtatattagtgtgctgggtatgagtatgtgtgtctctgtacgggggtgtcagtgtgtggagtatgtgtgtgtatctctgtgtaggtctgaatgggtgtgtttcagcgtttgaggagtgtgcatatctgtgcacaaatcactgtgagcgtgtctatcagtatcttaaagtagggcgtatgtgtgtctgcgcagggtgtatgggagtgtgcggctgtgtctgtgtgtgtgtctctgtctgtgtatctgtgtaagtctgcacctctccagcttggctgggccccggcactgtaaatccatcaactccacatgattttgtcaattctgacagctaacttcaacatgacgacaaatctggccccagaggatattaagcaaagacacatgagcctataattttctgcttgcacgtgtgagatgctataataatcaaaagaaaatgagtttctaactaccccagctctttgtgctgctgccttcatgccggctgcactaattgaatcacccggcaccactgtatcaatggtaacttgggtattggggggtaatcaggcgtgtgggggggaccagcttggagaggtgcgggggcttttgtgaaggtcccatctgcctcatgcaccaaagccgccagccgcccgcccgcatttggctggacaagggagtgactgaagggcagccctcaccaaggggaaggcctgggaggggatgcctgggggagggggcacctgtacccagatgctgcagctcaggccccttggtcccggaaggagaattgtacaaaaataataaagatccaggctttggagatcggcctacctgggctcaaacctggctgatggcccgtatgtcatttgatttctggggcttagtgtcctcatgtagaaagtagaacagccaatctacctcacagggacatacacacagattaagcaccctcagttagttgccttgcagagaggaggcacttggaagttgtcacaatttttactgttaccaagtattgacagtgctttcccatgccttatctgcttgtctcttcacagtgtgagataaggctcattatcccatttcattcctgaagaaacagaggctcagagaaattaagtaacttggccacttgggagagacacgtctttctctacctacaattggaggggcttgatcaggatgtatgtgtgttttctaagaaggaggaggaacagtcccttataacttctagaagtccccctgacagtcctgtgactcatcaaaaatcataatcactcaccttgagatggcggttgccagggccgcttactgtgtattaactcatgtaacccacacaatgagtttgtgaggtagaaacacaattatccctgttttacagatgagaagactgaagcacagggaggctaaataactctcccaaaggtcacgtggttcgtaggtggtagaattgggcttcaagcctggaaagtcagtctccacagtcctcattttgatctatcatttgtccttcctcttaaagatccagttgtgccccacactcacttttgcccctcaaagtcttctaaactgaatcccacatttgtctctaagagctgtcctctctgtacccaagggaccattcttcccgacgtcaggctgcagagtggaatggaaatccctccatccccaacctcactgtgcacccccacatcaaggcaggagattaccccatcatcttgctctctagctcatgccttccactctagctcaccacttccaatcaaatagcaagtgttcaccaagcagccgtttatattcctggacctggttggagaactgagggcttcaaagaggaaattattttaactccatacttttgtacaacaaagcttgaagcagtagaaagagcacaagctttggagacaggcagatctgagttctgattttggcactggcagtcactagctggggtcccttgggcatgtggctgaacatctctgtggctcaattttctcaactataaaatggagacatagttccccctaagatcagaaaaagggcaagtatgtctgctcttatcactcctatttcacactgacctggagatcctgcccagtgcaataagacaagaaaaagaaataaaagacatacagattggaaaggaaaaatagaaaccatctttattcacagacaacatgattgtcttcatagaaaactctaagaatcaatcaaaaataaaactagaagtattaagttcagtaaaatttcataataggtcaatattcaaaaataaattatatctctacatgctgataataaacaattggaagttgaaattaaaataagaacattaatcccacctcacaagattcctagaaggagtcaaatgaagtaatatttatctagaagtattgtgcttgtgtgcttcctgataagctttcttgagaggggaagaaagaaaggctgaaagagaatcacacccaacacccatcccctcctgtctgcaccaaaaccacagagagggagtatttctgatacatcctcaatggttgtgcctattaaaaatcttagggctttatttatccacaatttgggagaggcgggacctggggagatggttcatcaaaatctggggctccctggggaacaagttgtcatgaacacatgagcattgtccaccatggtggtctgcccagagagggacagagagccacagcctgtgtgcactcctcctcctgtccctccacctgctcttttgtctcatctttgtattattctgcatacctgctgagctgggcccaaaatgtacaatgcaacctgaacaaatcttaggccatttgaagcctgggtcacatccagaagaaaccctgatagtctccaaaagcattgattggcaatgaagcctttgcaaaactcccaaacaagcggcaaggtgggaaaagcaactatgtcgtacaacagacagaaactctctccaaatcctcttcaggcctgcctttccccaaagtgccataggtcactacactccccacccccttttttctttttcctttttctctcctaaaactccagctctgctctctcttgcctccacctctagttgactggatcgattctattctgatccagcttttgctgctaactttatgctctttcttcagtgaagcatcttccactttgtatcaccttgatcagctcagatgtgggaacatggcaggagaagaaaggctgtaaatattcacatcttaatatttttgttcctgcttcatcagaagccttcaagtggctcacagccttgtaggaggaggacaagtatagatggctacaccacaccacagtgacattctcctcaaggctggtctgaagcactatagatgcaaagtggaggttcaattcctgcagcaggtgggcatcaggaggaggcgactttgaaccggggcttgaagaatgagtaggtattcccctgatggggggacagagaggaacggggagaggagggagcagctacacttcacctcctcactttgtatccagtatcttcttttatttttgagatggagtttcgctcttgttccccaggctggagtgcaatggcgtgatctcagctcaccacaacctccacctcccgggttcaagtgattctcctgcctcagcctctcaaatagctaggattacaggcatgcaccaccacgcccagctaattttgtatttttagtagagatgaggtttctccatgttggccaggctggtctcgaaatcctgacctcaggtgatctgcccgcctcagcctcccaaagtgctggaattacaggcatgagccaccgcaccttgcccagtatcttctttactacccgccctcccaccaatagtcttgcgaggtgggtatacatgaatattcccattttactgaattggagactgaggcccaagaggaaatgaactcgtcaaggtcacccagagaatagttggagctggtaggacttgaattctggactctgtggcttcaaagcccttttggtgggcaggtgaagggagaggagagagaacttcaaacagcctctgtggtgggagggtgggggtggagtgaggaggctctggtcaccgggacatacaggtgagaccagtgaggtgcagtcagtgtgtacagcacgtcatcatttgtggcagaggcaggaaagactatacatatttgtttattcttggatataaggtctctggaaggacacccaagaatctggggacattggttccccttgggataggaactgggagttgaaagagagaaccaggacaccggggtagaggtagagggagacattccaccctctcttttatgctttttgaaatttgttgttgttgttgttttgagatggagtcttgctctgtcgctcaggctggagtgcagtggcatggtctcggttcactgcaacctccgtctcccgggttcaagtgattctcctgcctcaacctcccgagtagctgggattacaggtgcccgccaccacgtctggctaatttttgtatttttagtagagacggggtttcaccgtgttggccaggctggtctggaactcctgacctcaagtgatccgcctgctttgacctcccaaagtgctgcaattacgggcatgagccaccaagccaggcctgtttttgtttgtttgtctttgagatggagtctcgctctgttgcccaggctggagtgcagtggcactatctcagctctctgcaacctccgcctccagggttcaagcgattctccgcttcagcctcctgaatagctgagattacaggcgtgtgccaccatgcccggccaattttttgtatttttagtagagacagggtttcaccatgttggccaggctggtcctgaactcccgacctgaagtgattcaccagcctcagcctcccaaagtgctgggattacaggcgtgagccaccgtgcctggccactttttgaaatttgaatcatgtgaatgtgctacgtattcaaaaaaaataaactaaattgttcttaaaagaaagtaaatttaaaaataaacattacacagtcacattaaaatccaaactaaaacagtccccagcctctgaccatgtactggagggtcacctggagtctcggcggtagcccccgttggggcctggttccgctgcagaagggatatgtgtggcgtctaagtcagcggcagggccctcggctggctgccaccagggcccgctccccctccagtatgatgggtgaggggttgtcagacggaggagcagtgggggctgcaggagagacgtccgagatgggacgggacatttgggcagttggggccgatttgtcgccattttcacgggcagacttgtgaattaagtggcatgaaattgagcacagaccaggctcccccccagagacggggcagcccccgcccaggaggggagaaggcaagggggcgggagcgggaggggtggccccgctccacgctcagctgcttctgggtgcagatggagacagaatggaagggggaggggctcagctcttcctcccgggcccctcctcaccctcagctctcctccgacaagcagagggcctgccggaccccagcgatgggctagcctggactggctcacttgtgcccaagcacccctaggagtcaaggctggggtggcagcccgaccagacacccattcagggggcccctcagcatctctctgcttatctctgcgtctttctgctgccatttttgctcagtactgagaaatgacgactaaagggaagcagggcctgacgctgcttctctggatggatagagaagcttttgtgccaggaagagttggaggcggcaaagcctccagtgggagatacgaggctcgtgggttgcggtttgggttctaaccgggtggctttgagtgagttccttatcctttcctcagcctccatctccttatctgtaataataatgatagcaaccctgggcctggtgttgttctaagtgtcttgtgtactctgcagcaattcattccatcgtgataataccttatccggcagcactgttatcagttactcccccgttttacagatgagaaaacagatcatccggccagtgagtggtgaaaatgggatttttgtttaacacgctgtcacctcggggagtcgaggggaagattaaatgagataatgaacatgtatagtttacccacgatgcgtgtgtaacaaatgagagctgctgtcatcactgctctgtctgcctctcggcaggggacaggtagctcaaatgcaaagtgttttcagatcacccagtttacatttcatggacttgacagacggaagacgaaggcccagggaagaaaagtgacttgcacaaggtcacttgagctgggctaggactgaacagacagctcagtgacctgagtccttgctctccaggcccctaaggacatctcggggctctgcagatgggcgagggcctactttacttgtccacgaggagaggcacagcctggaatttcaattatcctgggcaccgcaggctccgagttcctccccggacgggcgtgggacctagccctagcctgggtggggacgacgagagaagacagccttggtctgccaacctgggcacctcccgctggacagagctttgtcccacaattaagaaggatgtgtttgcctcagcgccaggcccaaagagcccacaaaagccacaaggagccctgcaggtggccagggggaggtcaggccccatggtgcttaataggacctaatctccgccagtgttgtcggaaatgaaaatgaaaaacagccgcgattttgtggtttaaaaattagcatgtgtgcctacgtcgtaagcccctggcctgcattaccatacagattcatcccaggcccagcacgcggccaaaatatgtaattacacacaggctcggggtagaaaagttgctctcctcattgctatctatataatatggattttaaaaaatgagagctaggtctgaaatgttgtgagggacttacttcatgaggtatgctgcccatggcatttgaggagagggagggtctcaccccctcagcagtatgtgatgtggggggcacatggatatgccaagttcagagctatctccccggactgggggaagagaacaaggaagggaaagccttgctatgaaggatggtgctctctatgtctgggtcccattcagtgctctcatttgcacagaaagcctgaaaagtaggtatctttgtcttcacttgaaagatgaagacactttgggaggctgacgtggttggatcacttgaggccaggagttcaagactagcctggccaacatggtgaaaccccgtctctactaaaaatacaaaaattatctgggcgtggtggtgcacacctgtaatcccagctactcaggaggctgaggcacaagaattgcttgaacctgggagacagagtttgcagtgagcagagatcaagccactgcactccatcataggtgacaaattgagactctgtctcgaaagaaagaaagaaagaaagaaagaaagaaagaaagaaagaaagaaagaagaaagaaaagaaaagaaaggaagaaagaaaaagagaaagaaaaaagaaaagagaaagagaaaaaagaaagaaaaggaaggaaggaaggcaggaaaggaaggaaggaaggagaaagagagagagaaagaaagaagaggaaagtgaggctggcaagtggcaaagctcaaaattcaaactcatgactccaaagactgtgcactttccaatatggctcccaacttcaactcatgaacagagaccttagttgaagtcagtaggggaggctgaagggggtgatagatgcgggaggtatgtatcagtgttcaaatatgaagactgaagagaattggggtcttcacatagggatcaatggtaggaaagaaaagaaaaacagagttcccaaccattagcacaaaactgacacacagtagctataagaaatgaatgattggtggaatgaatgaactgaagccctaaaataaaaatcagcatccttgttcccggctgggtgggggataatgcccagatactgagagagaggaataaatctatgtcccaatgcgggatcaatgtcccaatccagagttggacaggaaagggagttccagtgtagaaatcaataccccagtgaagatttggttgaggccatcagcatctcatatggggatcaatgtcccaatggagagttggttgagaggaattgatgccccccaccatacagatgggtaagaaagtcaacatcccaatgtagagatcaatgccccaattcagagttggttaaggaaaatcgatgtcccaatgtagggagcactgtccaaatatccggatcaatggcagtcaatgatatacaaaagtggtggtaacaatgttccaatgtgatatcaatgatagccaaagtcccactatagaaatggatgggagttcatgtcccagtgtagacaccagcttgccaatatgaagatcaataggacacctatttgtgacttctaggcttcccttggagcttttctactatttgctctaaaggggtgacagttcccagggtccctactctggctaagtcctccactgcagaaaatttgggcatctgccccaacacaccccagcctggttatccacagtagttcctcttggagttccccttggacttctgtagccaatctccagagacagcttgcaaatgagtccaaaagatcccagcagcctggaagaggctacttactttccagggattatttcctgcagggagaccaggcctctggctcttccagactcagcccaaaccagtagcaagtgagatatagtcacaaccagtcacgttctcactccttggcttgatatgtgtctaaaatccacagttatccatgttactattgcatctgtcatttgagtgattgcttccccacattttacagctgagaaaagcaaggcccagaagagtaagtaggtggccgcagagaagtggcagagatgaaactagaagcctgatccccacctgccagctcagcccttttccagctgatctaggttgatgtggcagaacacaccccacccccagcctaagtgggttctgggagtgtgtcacgcagtttaggcagacaggttcaagggatctctcccccaaaccttcactttcctgcatctttcccatcactgctcaaattccccaaagttgggagacaagaaaaaggcccctgttgctctccagggttggcgatggagttgaggggtgagatgactaaagcctcccagcttcagctgccccaggggcttaaggggagggtgtgatttttctcttgctcagacaaaggctggggctgtggcatctgtcgctgactcttgtgtcttgcagctgctccgacagtcagacccaaggcaggtgccagtttggggagggaggggcatgagcgccctcaacatgcactcaaactccacttcttcccctcaccctcacgtgtaaatgcagtgtctcctgccacccttccccaccccaacaagcccaccttgtccctccaagacctagggtttgggggatgagacccacattccccatgactctactaccccttccccaagcgcttgtcctgccgagttccgctgccatcacacttgagcacctttgcccagccaaggaggagctggggggaggggctgtctggcaggagataggggacccttgtgcctgatgggatgtctctttactcaagcttctcttctgggaccagagagttttctgcaggcctcctgagaggctggagcctccagttcttcaccctgggaaggggagaggctcatcacagagatgagcaaaacactgctggaaggggagagagagagcctggggtattgtcagactaggtgtgtgtgtgagagaacatgagaacacattcccccccacacagggatattcatgcacagttttgcagacatacatgcatacatgtgcacgcgtgcacacacacactgtcatgaagccaagagacatgagacaagttggaaaagtgtttcaaatacccaatcagcactctgtgttctccatcttttcaaaaatatttatttattcacgtatttattaaaatcacattacaaccccatccccactgtcttttcaatgtgtaaagagaagcttaaggcaaaaaaaaaaaattttaattaaaaagaaatgcaaaattttcatttaaaaagaaaaaagaaaatgtctaaggcagctgaggctcctccattcaggcgactaattgtaaagatcatacacgtattttccttttaattctgtgagcagggagaatatggtcagggcagcagtggagccaggaggaggaagatgagggtggtggtgagaatgtccctattaagacgacgatacaggggaaaaagaatatttctgtgcaagctgcttgatggggaaaaacgtaaattttatacaaagatgctcccgagcccccttcccagtgcaagcctctagacttcttgctcccactcccaacctcccagccgcctccctcctcctccctgcctgtcccaggcctcttcttccctccctcccctgcagccctcacccctccccagggccccctcctcagatgcaatccccctgctgtaatttctgggggaattgcttcatctcgggtgcagatatatttgtgtcaaggtgcagctgcacagatagccttcctctatgcatagtaagagggtttcagagagagaggttgtgcccagagcaaggccttatcagagcaagctgcctgccatttatctgactccccatcaaataggaaaacgggcctcaggctgctgcttccactttccttgggaaagccatggggggaataataatttactccaatctttttgtttccagcgctcaccttcagcctgacacagcccctctgccactccccacttccagcaatgccagcctgggggtacaaggttgagccccagcccccaagggcccaccccagggacacccccagaaatgcccttgctggttgagtggaccttcataatggattggcatgagctggagaagatcccctttggcatcagggattgtaggcacaggagaaaggaggcagagacccggtggggagctggggaggcttggcctggctgcagggggcctggcttccttcccagcccccacacatatgcagatcccccacaaactctcactgtgtgcgtgtgtatgtgtgtgtgctcacacgcccagatgcacatgcagtccctgtatgaggacctatcggtacctttatctgtgtgtctgtccatctgtctgtctgtctgtgtctggggaggagatgaatgggggactgggggcggtttctgttctgtgtcacagactctgacctctcatctcagttcacaatcccaacagccatgagcaagtccaagacaggatgacagggactgtctgaaagggagtgaacagtgggcgagggaggggtcccagccgggcctggtggtgggtcgtcttgcctcaccctccctggcgaaggctgctccagggagcagcaggcagcccatctggtgcaggagctgcagagaggtgggcagcggggagggggctgctccccacaggccagccataaatcacagttatgtggccagggggcagggggcagccgtagcagcacacacaggacgaggcagagaggccagggtcaggtgcagctgtaaattgtcacctaaatgcttccaagtgaaggctaatcagagcacggtgacagaacacacctggccccaccctgccccagtgggcacacttatgtctgtgcaagcacatacacactcacagatacaaaaccatgctgggacatgttctgcatacaaagctgcacacgcaaaggtgtcacacccatacctggatacacaaagacacacgtgtttgttagtgccatgtgtgcatgtgttcggacacactcccaggcagccctgtacccatcgtgttcattcagacccaaggacacaaagatctacctaatgcccctgggtggatacgcccatgcacaggtgggcatggagagtggagagcagacactgtccgatgcccagggctagtatgatctggagggcaaatcccccaccgggaagacgcaggaatgaaaagaggtaaacgtactgagtggaactgggccaccccagccctggaaccccagtgactatgctctcctcccaacctctccctggctgggccttcatgccattcaccagcctttctctagaaggtcattcctcaaatgtgaagagctcacaccgcacccatggtggagtaagatggaatttggtctctccctgcacccgtgttggagtaaggctctttcattcattcactgccatctactaggcattgtgcgaggctctggctatagaatgccccaccctcaaatgtaaaacctagcagagaagagacaaatgagcagatgcttacggcacatggggatccttgctgcaagcgaggctagcccagggcagtgaggacatggcagagggggacaaggaaggcgttctggaggaaactatgcccaagctgaggcctgacacgtggaagccagccaggtggagaagcagagtgaaagagggaagtgtgcaaccctcccagagaatgtccatggcagcaggtaaggaaggcaagtgataggatggcccttggcatgtgctgaggcaccccacaaggcatccacctctgagccttgaaaccagcagtgagactgctacactcccttacctggacccgtcaggggacacccagcttgcatctcccagggcttccctggtgactcttgtaccctgttctccatgcaaaggcaacctgaccagagggaaaactgatagctggacccagcctccagcagatggcatcatcactggtgaatggaacaaggatcaggagccctgaggggcgctgagaacaaaagcaccgagccccgttccccagccctcttctctcgggcctcctggaagtctgcggagtttcagcaaagccttctctgattcattctccatgcagaggctttttgaaggtgctcagggtagctctgcgaggtccatggagcacctgggattgagggtgatgaggatgggttgaaaagcaggactctgggaccccagcctcagttcagcccttcatccacttgccctattgggcttcctaacaggactgcatttgaacaaaggactcagtgtgggaaaagggccaacccataggacaaagtccaaaggcagcttggcattcagcaacccccaaacttcaccctatctgcccttactcctgtgactcagcccaggggtctctctacagccctcaacactcccctgctccctcatcccaccagccctcctatacacaccagtccccttatccctcccacccctgccccaccctgaccctctccccaagccaaactccaactcttcattttcatttccaaacactccatgagtacctgcaacatacacgccctatctcttgtaagtctcctctagagaagtctgggagatgtagcttcattttacaaatgagaaaactgaggctcgagagcttaaacgatctgtgaccttaggaaagctgcaggaaagctcattctgggcctaacctaagcctccaagcacagaattgattcccctctcttccatcccacccacagtgaccatggagcaggggcttttctctcctcattcttgcaccaaggcttagaagaaggcacaagtttctgggggtcagtggtcagaggtgagaaagagaaagaagagaaccaaggcatcctcagaagcaaagagtagggacaccatcctgcaaagcaaatatgaattatttcagaacattttcaaatgaaaaatcctctcttcctgcccagccctgtgatgcattaactcctctttccacccttctcacctgtgtggagagtggccaggccaggagggccccacccagcccagagctcccagggaatggggctggaagtcagcccatcgtttctttggcctgaacgccttttggtttgctcaaagtgtctcctgattccttgtctgcacccaggatcagtgagcaagcattaccgggagcctttcctactcctaacattgtgtgtcccttcacagcttccagggaaccctccctacgctccaggaaaatgggctgtattcttcccattttacagatgggagacaggttcaaaaggtttcagtgacaagcccagggtctgataaatggcagagctgagactcaaacctgccatggaccagatggccacaggggaaggggtgcctgtgggtcacatgttcataaagggaggcctggcctggccacgatggccattgacatcttcggttatgagtgtcctctctttttttcctgtcttttttttttttttttttttgagacagagtctcactctgttgcccaggctcaagtgcagtggtgcgatctcagctcactgcaacctccacttcccaggttcaagcaattctcctgcctcactcagcctcctgagtagctaggattacatgcgcataccaccatgcctggctaatttttgtatttttagtagagacagggttttgccatgttggccaggctggtctcaaactcctgacctctggtgatcctcccaccttggcctcccaaagtgctggaattacaggcattagccactgtgcccagccaagtgtcctgtctctcttaagggggtggctccttccagtcaggtagaacaagagagaagagagcagaggctcaggctctcaggcacgcttccgacacttttggagccccagttttctcatctcctcaatggtacgagtaatattaaatagtatctgtccaggattcttgagagaactcagtgtgactgtgccaggagcctgtgcagtgcaggctctccacacacgcccgtggcttcctcatgccctgaagcatgagggtgggctacgtgcttgttaattgatggaaatgcctgggtggaggacatcacatcttgaggtagctggaactgcacagggcctctgctctgtgcctggcctgcacgtgacatggtgtgagtaaggagtccttttttcttcttcccctacccactgcctgtcctctcttgccctggggaaggaccagccccctcagagcttaagcaggtaaaggacgcggagcagctccttcccagctggttcagggttttttttcctaggtagggctgcccctcgacccacaccccaggccagcctcgcagaggcctctgatccccctcacggatcactggaaatggacccaacactctccatcaccactgcagacaacagcctgatacaaatttgcaggcaaaggagggggcagtcgatacggattagaaagaaggacctcctctggcctggagcctggggccgccattgatcagcatcttcactgaggaagccagcttggccagtggccagtgggcacccaggtcggggccatggcctcagtctgccaccttaccccgccaaagagtcctgaagaactggggacccctaagtgcactttgtagaggaggaaacaaaaaatcaaggagagatcggggagaagcaaacaggcaacccagccccagccccagccagctccgcacctccagcagagccagtttttcttggtgttgagaaaatggtcagcagcttgtcacagtccagtgaatctaaacagccctctggaaatgttgttgaatttcagtcccaacgcagagatacccatatacatgcctgcctctcctcctgccccttcctgaaacacaaacagttctctcatggttgcatacacgccatgtgatccaattccatctgagagcatttgttgagtacccatgtgtgctaggctgcgactatagacagcttcatgccctaaggaatacacatctaagagaaaagacaaacgtgacaagaggtcatcatagggctggcggaaaggtgcacctacagaagtacaagcagtgtatagaagaaggggtgatcaactggggttggggatggcacttctcacaggagatgtctcagcagagtttctaaggatgaacaggagtttgccaggtaaacgtggtgacaagtgaattgttatcatgttgcttcccaccaacatttggccacacactgggctctcctcccttttgctgcctgtgtactttccattacgagcttctttcactcacaacacgctctatgctgttccacttgcctgcaatgttctttcccttcatccctgactattctctattcaatcttcaaggctcaccttaaagaattatctctcctcagagagagctatggcccccctaattaaaggcagccatagcatcctacatcttccattttctaactctaacaagctcgctggttggttggtttgctggctggctgattggttggttggttggttggttgagtggatggatggctgcatggatggatggatggatggtttgttcaagaagctaaactaaagagaaattagaactgcagagatatgtagagtacaagggagtgggataactgtggtagaatcatgggagatgaaactgaagagtctgccaggggtgggattgtggaaggtcctgtagccatgcctagtacacattgacatacaaagtgaatcctagaaccttagcagtatgttctggagataatagcatctttgaaggggtagaaaggatatgatacctttcctccccatcataagggtcacagccaaaatttctataacaaaaaccaagttaataagagaaaagcattaaatgtatttaagcaaagtttgatgtgacacaggagccttcagaaatgaaaacccaaagactcagagaaaactgtctatttttacgtttaggttcaatgaagaaggggacagccatatagaaatgtgattagacagaaaagatgtgacttaacagtaagagactgagtgggggagcccagcaaggcctgtctgttcagattcttcttggcctctctgcatagcattccttcctcgctggtatagggcaggaccccttctggaatgagggtcttatgacctactaccagacaaggtaggtcagagaatttctttatggccacctcctacacacaaaggcaggggaaggggtagagtaatatttctagtttctatgacccgtcttggagaagagaaattctagtttccatggcctgccctgggggagaaaagggagcaggagaaaaaagaccaggagaaggtcagagagagactttgtttctgaggtcccgccagtgtcctccagttcaaagtactcagcatgtcaaagtgccaaactgtggggtatcattttctaatccccaataccttcattttgcaaatgaggaagctgaggtccagagaagtggggcttgctacgaatccgccagagggcagaagcaatggctctgccaagattatacccctgggcttgggctccaggtccagggctctttcaatggcacactcagcctcctatatccccggagggattagacgtgataagatatgcccttatttttcaggggtctcctaggttgggccttcctctctggatatactgccaaaggccacgtgccgtgctcccatgcacacagcacctgtatccatcagagcaagcgactgaaacccagcttaatctagtttcatccaaaaggggagcattggcctgtgtaactgggaaaggcaggtgcagctgacttcaggtgcagctggatccaggcactcaagcaatattgccaaatcttacaactctgtgtctgtctttgtgttggctacatcctctcctcctgatgtgcttccttcatctggggtaagaaggatgggtggggacagatggcatgacctcatggaactggtaaggtagagagagggaaaacttgcctctgtatagaaaatcccagctaaatcttccagtggttctagctcaggttcagtccctgtaattagaaaaatggggcactatgatttggcaatcctaaatttctggatctcatgtccgtgttagaggccaggagagggcatggtacagtgattgacagcttatccattgaaatggaaaggagaggacaattgcttctaggccttttggctaagaccaagtgaaaggagaggacattacttcaaagggaaggggtgctgttcagagcaagggagggatgctgagcagtcaaaaatgacagatggccacagcagtcctattccagtgctggataacagggcagcacctggatgactccttgaatataataataataataggccgggcacggtggctcacgcctgtaatcccagtactttgggaggccaaggtgggcagatcacctgaggttagatattcgagaccagcctggccaacatggtgaaaccccatctctacaaaagttagatgggtgtggtggcacctgcctgtaatcccagctactcgggaggctgaggcaggagaattgcttgaactcgggaggcggaggttgcggtgagctgagattgcaccactgcacttcagcctgggcgacagagcaagactccgtctcaaaaataataataatatagcttttagagtatcctatgcaagtactctgcatacattgtcttatttaatctcatttaaatttgaagggagcaggtttgagtcccagctctgccatttatcagaccctgggcttgtcactgaaaccttttgaacctgtctcccgtctgtaaaatgggaagaatacagcccattttcctggagcgtagggagggttccctggaagctgtgaagggacacacaatgttaggagtaggaaaggctcccggtaatgcttgctcactgatcctgggtgcagacaaggaaccaggagacactttgagcaaaccaaaaggcgttcaggccaaagaaacgatgggctgacttccagccccattccctgggagctctgggctgggtggggccctcctggcctggccactctccacacaggtgagaagggtggaaagaggagttaatgcatcacagggctgggcaggaagagaggatttttcatttgaaaatgttctgaaataattcatatttgctttgcaggatggtgttgtgcgctgtcagctctgtaataacttttaggcctttatttattgttttgccttaatgatttcatgttgctccagtgtcgagaattctcagtgtcttgtaacacataatggcagagaagactcaggccatggcaggcatggagcgagggtgtcatgctccccgacagaccccactggtctccaggagatggcagagcctagagcagaaagcggaggccatcaacctctgtgcaaagttatctgcgagcactaattctcaacaacaccctagggagctggtactattatcccattttacagaagtgaaaactgagccttggaacaatcacaagacttgccgtctgatcgtgtgtgaccaagccaggatttaaacacaggcctgttggtgtgtcttcaactttggcatatatagaaattacctagagagggccaggtgcagtggctcatgcctgtaatcccagcactttgggaggccaaggcaggtcgatcacaaggtcaggagttcaagaccagcctggccaatatggtgaaaccccgtctctattaaaaatacaaaaattagctgggcgtggtggtgggtgcctgtaatcccagctactcaggaagctgagacaggagaatcacttgaacccaggaggcagagattgcagtgaggcgagatcccgccactgaagggatcccactcctgggtgacagagcaagaccaaaaaaaaaaaaagaaaggaaggaaagaaagaaaagaaagaaagaagaaagaaagaaggaaaggaaggaaggaagggaaaagaaaagaaaagaaaaagaaaagaaatcatctagagagaatctaaaatatgggtccctaggacccaactgtggagatggaattcagtaggtctaggatggaggctgaagctctgcatttagcaaggtgcccagatgagtcagagccataggaactcagctggtggctgggaccacactagtcacataatcagtgggaccgagttcctcaagaattatggtcccatgactggcccatttctctcacaaatgtcccatcagctactcctgttcctctgccattctccatcctgtatctctgagggcttggactgccccgcacccccagagctctagccccttctgtgaagctgggagaggaaggggagaggaggggaggaaggggagaggaggggaggaaggggaggctttcttggttgccatggtgattctccacctcccagtctgtggggggaggcagcttcattgtgagcctccagccaaggcctggagggcagcaagctgtcctgggctgggaggatgcagaggggtgggaagaggactctagccactggggagaggggaacaggggaagacaggctggggacaaggaggaggaccctcggcccagggcagccggagcagagagccagcccctccagatgctggggctgccagccttcagcccaggaggcgaagaggggtgtgtgcaggagctgaggctgacagggcctgatgctccctgagcccagagctggcagaagacccagggcaggtggtggcagagatgcagggacgggtgagacagctagagaggctggcgcaggacagagtcagagccacaagggctgggaaagaccagggctcagaaagcaaagaagagataaagaaaaataaaacaaagcaagagaacccctcaaggaccccaggccatggcccactcccacccccagcggggccagggctggcacagcctggggtcccagcctgctgggctgggctggcaaaccggatggcacaggctgcggcagaggcagatggagcaaggaggggcctgacccacggcccgctggggaatggctgggattgtctgttctttggagccctcccactgtcccccaaacctcctgcctctgggagcatgctggggaaacagggagaaaaaaagaagcaacatttcggagccagcatctccacctcctcctgctccatgttggccttctttccctgccagtggcacgtgctgcatgctcccaacctggctctggcaaagaccaggacattgttggggggctggagagtgatgtaggggaggagagaggagggaaagatgctgggaggcgacaactcagaggggaggaagaggaaggaaaggagagccctggcagaggccatccctcaccaccagtatttttgaagcaagcacttacttggtaccaggccccactgagtacttcctgtgtattcactcatttactcctcccaacaggcctatttcataggtgctgttgttctaatccccatttcatagatgagaaactgaggcagataggggttgagtgacctgcccaagcgacaagctgggaatcagcagaaagagggattgaacccaggagaggttcagaggttgctctcttagccactacactctcctgtccttcatgcccctcacccacgtgttgagtgtttcaatattttttccttcttacccatcttttctcagtgtttctccagccagcccttattccttctggtggtgtgtcccagtttgcctgggcctctaggccagcaccaggacatgaatggccgggagcaaacacatcgcgtgtatggacacatggacacacggacacacatgcacgactgctgcggagtccaccaacatgtgaatgtctgtacacatctgtacagaacaagtgcgcacacccatgtgtctgtgtacatgcacacgggtccattcgcacatgtgaggccaccattcataccacaccctgggtgggtcttgagttctcacccacagagcattaactgtggcaaaataatcccaaacaacggtcgagtcaaaaaaatctgtttggctttgtactaaagtgctgcttggcatatggggtttttggcaatacatttacctttctaggtttagctcgggctgatgtggcttcctgcatgtcaacctctgagaacctgccagatgccaggccctcggcaaggcactacccagacagtctctccacgcctcacggcagccatgaggcagggcttgccatccccattttacagacaagaaccttgagacagcgagttcccatttgcacagactcacagggagagtgaggattcgaaccccagggcagttcaagggtcggtaaagcttgagtgcctgcaggtgggttgtgagccagacatgtgacctcccaggcgtgcctcatccgtctggaatgtggctgcctcaccgtctggtcacgtctgggcccctcttctgcagcgaggctggtgggtatggaggggctgtggtggctcacgctgagctgctctacagaaggccccacacagggccgggtgcagcgaggtatgaaaaaggcttttccccagcgatgacgaacacgatagtgatggctcagactatacaaagaacagactgacttatcaccaccacatagacacaggcatatccattccttcagtatttctcaagcacctactatgtgcctggcatttaatgggctctgaggaccatgcaaataggaatcaagcttggaccctgccttccttccaatagcttaggagaatagtgatcaggtgtggaaacagctttcattacaaggctgaaaaaacctgaatgctgtaagagaaatgcagatgaaaaatgagagtctacttcccactggggacatcaaggtagccctcctggagaaagaggctcctgatgggtcttggagagtgggtatgatttgatgcagtaatgaaagtgaaggggttcttggttttctaaagaacacagttcaagacataggatgggatattggcgggtggacatagggaaagcaagtagctccatttgtctgtggcaaaactgtgtgaagggagtggcaggaggtaggttagggtcagatgacagaagatcttgagatgctggactaagagcttggattttatagataagggggagccatcaaagactgtcaaacaagggaaatccttgggacctgtttcatttagtctagactaatctgcagttgtgaacaaagtaatagattggaaatatacatgcatgcacacatacacatacatgcacacatacacatacatgcacatcttcagaaatgtgcagacgtggcagacccagtggctcacacttataatcccagcactttgggaggccgaggtgcagggattgcttgagcccacagtgagaacttatctctacaaaaaatgaggatcacttgagcccaggaggtcaaggctgcagtgagccatgatcgtgccactgcactcccacctgggtgacggagcaagaccctgcctcagacaaaaaaaaaaaatgtacaaacacacatgtacatgaatgtacacttcaaaagcaaaggattaattcctgaacccagctattttaaaattctgaattgtatttgtttatttaaacatggccgggtacagtggctcacgcctgtaatcccagcactttgggaggccaaggcaggcagatcacctgaggtcaggagtttgagaccagcctggccaacatggtaaaaccttgtctctaactaaacatacaaaaatcagccaggtgtggtggcgagtacatagtcccagctacttgggaggctgaggcaggagaatcgcttgaatctaggaggcagaggttgcagtaagcccagattgtgccactgcactccagcctaggtgacagagggagactctgcctcataaataaataaataaatgtaatacattcacagtatctaaaatccaaatgaaatataagcaaatggctgggtgtggtggtccacacctgtaatcccagcactttgggaggccaaggtgggcagatcacctgaggccaagagttccacaccagcctggccaacatggcaaaaccccgtctctactgaaaatataaaaaattagccgggcgtggtggcaggagcctataactgcagctacacgggaggctgaggtaggagaatcgcttgaacccaggaggcagaggctgcagtgagccgagatcatgccattgcactccagcctgggcaacaagagcaaaaatccttctcaaaaaaaaaaaaatatatatatatatatatgcaaatatgctgaaaaattaagctacttctcaccccgtgttccagggccccaatttgttctgtccaaaagcaagtacagtggccagtttgagagcttccttccagagaccttctgtgtttagacaagcaaatacccagctgcattgttattacatacgtttttctgcaccttggttttctcacgtaatataccttggagatccttacatatcagtacacggagggctgtcctggtctttttaacagcagtatactcctccataataacgggacatttacattatttctgctcttttgctcttactaaaaatgttgagcacctactaaatgtgcccagcacatttattgagcacctgctatgtgctgggcagcattccaggtgctagagatagaacagtaaacaaaacaggcagaagtccctgccctcatggaacatgacttctattgtgaacgtgtgagtacatcttcaggatgcattcctagaggtggaacagccgaaacaaagcatctgtgcatttttaaaatttagtagataaagccaaatccccatccccaccaagacagagtctatcaatttacccttgcaatgtatgagagtgcctattttcccacacttttaccaacaaaatgttatcagatatctttatgtgtgccaaggtgacaggtgaaaaacaactgtgattttaatttgcatttctcttatgatgagtgaggttaagcatcttctcatatatttgagagcaatttcaaggctgggcatagtggcttatgtctgtaatctctgcagtttgggaggcagaggtggaaggatcaatggagcccaggagttcaagcccagcctgagcaacttagggagtctccatctctacaaaaaaaaaaaaaaaaaaaaatacaaaaattagctgggcatggtagtgtgcacctgtagtcgcctcaggatgctgatgcaggagaatcactggagcctgggaggtcaagactgcagttagccatgatcatgccactgtactccaacctgggagacagagcaagactgtctcaaacaaacaaagcaatttcaggccctttcctgtcaactttctaatatcctttgctcatatttttattagattgtggatatttttcacactgagctgtggatatttttttttggtctattaaagaaatgagctctttgcctgtggtgtgagttgcaaatatttctcccctagtttgtcattggtttttgtactttgcatatggtgggtttttttttttataatgcagacttgtaaaatgtgaaataaaattttaaagaaattctgctcatgcactttgcctccttatggtgaaatgtttgttaggattgaaagagatataggctggtgcagtggctcacacctgtaatcccaggactttgggaggccgaggtgggcggattatttgaggtcatgagttcgagaccagcccagccaaaatggcgaaactcttctactaaaaatacaaaaattagccaggcatggtggcacgctcctgtaatcccagctacttgggaggctgaggcatgagaatcacttgaacctgggaggtggaggttacagtgagcccagattgtgccactgcactccagcccgggcaacagagcaagactcagtctcaaaaacaaaaaaagaaaaaagaaaaacaaaggcatatagatgccaacaacacaatcttgggttccattaataaaagcacatgttctggctgggtacggtgtctcacacctgtaatcccagcactttgggaggctgaggcgggtggattatctgaggtcaggagtttgagaccaccctggccaacatggtgaaaccttgtctctactaaaaatacaaaattagctgggcgtagtgatgcacgcctgtagtcccagctactagggaggctaaggcaggagaatcatttgaacccagcaggcgaaagttgtagtgagccgagatcgcgccattgcactccaggctgggtgagaagagtgaaactccatctcaggaaaaaaaaaaaaaaagtgcacgttctagaaaaggaaggtgagtgtcctatccttttctggtgctccatcttaagaggtctttggacaaagaggggcaagctcagaagagggtaaccaagatggtgactgggttttaaatcaagtcacataaggaatggcaatagaactggcatctttgagcctagagcagatcgctgtctatgactatcatctgaggcagtgggactagcctcatgatataaaaccaggccgtatggtggagaatcttggaagccaagagtcagacaatagagctcttttcaaggcagagctgtctgaaggtggaatagcctattttgtgaggaaatagttcattaccagagatgcacaaactggaactcgatgacgacctctcaaagatgccaagggttaggccacatccctttcaaaactccttccaatcctgagacctcatcattctacaagaatacaaggaataggcctggtgtggtggctcacccctgtaatcccagcactttgggaggccgaggtgggcggatcacgaggtcaggagttcaagaccagcctggccaatatggtgaaaccccgtctctactaaaatacaaaaattagcggggcatggtggcaggcacctgtagtcccagctacttaggaggctgaggcaggagaatcgcttgaacccgggaggcggaggttgcagtgagccaagatcgcgccactgcaccccagcctggctgacagagtgagactccatctcaaaaaaaaaaaaagaagaagaagaatacaaggaatattaaaattcttcattttacagatgaagaaaagggggaaactgatatgcattgtgcacctactttgtcctaggcacttcagcatatatgacttgattttaaaggatgagaaccaggaaggttaagtggttcacctaaggctgcacagcaatttagaactggaacccacatccccagtctccaactctagagctctctccactgaacctcctgtccctgatgaaaaattaaacatatgttcactgcatgtttattgcatacctattctgaatggacactaacgtggacaagaaaagcacattgtatgcagggtgttaataaagtcatggggtctttgctctgcagaaggtcactgcctagtgggcaggtacaggtgccatctctacgttgcttgatttaatgcaaattgtgtcccctggagttgtgcaatgtggtagccccagatagaccgataaggaaatatgaagcgatttggcaagtgttgtaatgaaatcacacacaaagtgccatgggaatgtagaaggcataattaattctactagggaagtgaatccaggaaagctacacaaaggaggtgatgcccgagcagggccttgaagaatgtgtaaaaaaacaaaaggcagaagagaataatatgtatattcatgccacatacatttattgagcagttccaggtttccagggatagatgaataattcactattgagtaggggagacagacaaatcaccaataaattgccatagcgtataagtgtaacggtgaaaacgtactcgccaggcaaaagtggcgatagctccttctggaatcaagtgaggcatctgggaaagctcctggagaagtgatatctgagattttaggagccgaaataaatattttcccaggctgatgataaggcaattgggagaaagggaaaagcattctaagcagagggaatggcacgtgcaaagtttctgactcttgaaagatgattctctctgtcttcaggtgcccaaagcagatctgaaaggcttgagtggaaaatgtgggcatggtgggtcgccaagcaggaggtggaattgacatacaggcgtttgggcaggacccaccaggtttccagatgagtggggaaacggcattggtgtgtatcgggatttaggaggcttagcaaccttcccttcaaagtcatgccccagattgagagctggaagagaaaagtgtgagctgtaaatccccagctcctcccgctgtgcccagtactacagagctaggagtctccaccagctctccagtcccaccgctgcgaccccggctaatccagcctcctggcccatctgacacacacttccacttaacattttgttagcgactctataaacgagctctccctgaccttcaatccctggctaattgctggtttcatgtacaagactagcttaattttacgtgataattacctgagagtggcaatacatatggcattgcatgttcgaaatgtcaggcctggaaatctaccaagtggccatagtcaggggcaaagggaggaggcagccaggggccacgaggagagacaaaaattgtggacactcaatgcagacagaactccagagaagcagggtcctggtctacagcaggtctcagaatcctcagctggtacagtacacccaggggcacaggccagaggagcggcatgtgccgcagcctcacatgcgcatgcgcccatctcggagaaacaccagccaggtcagaggcacggctcatacacgctctcagtcaccttttcaacatacgctcactgagcccctactatgtgccaggcagtgtacaggcaattgtactagtttcaaactcccaccccacccagggaaggtaggaagatgtggagggtatgtttgggttgtcacaattatttgggggctgctacaggcactgaataagcaaggccaggaatgctaaatggcccacacagtcccgttcaatgaagaattggccttcctgttgcttgagcccaggagttcaagagcagcctgggcaacatggtgagactccatttctacaaataataataataataaaccaattagccaggcgtgttggtgtgcacctgtagtcccagctactcaggaggctgaagcaagaggatccccttgagttcaggaggtcaaggctgaagtgagctgtgttcttgccactgcactctagcatgggctacagagcgagaccctgtctcaatttaaaaaaaaaaaaaattggcctccccaaatgcctgtggtggccccactgtgaaacaccctgttgaaaaccatcacatctaagccaggaccccagtccggaagaagccaagtgtcctctgccctattggagattacagttggggaaggaagacaatggcaaggacttgtgctgcatgagagagtaatggaaggggacccaggaacatgtgacaggtgaactgacagagtccagagttcagaaaagacctccctttaaaagtgacggccgggcacggtggctcacgcctgtaattccaacactttgggaggcaaagggcggtggagcacgaggtcaggagtttgagaccagcctgcccaacatggcaaaaccccgtctctactaaaaatacaaaaaattagccgggcatggtggtgggcgcctgtaatcccagctattcaggaggccgaggcaggagaatcgcttgaacctgggaggtggaggttgcagtgagccaaggtctcgccactgcactccagcctgggtgacaaagagaaactccatctccaaaaaaaaaaaaaaaagtgccatttcagaactaagctagacacaaaaggattaacgtggcagggttccacttccatgaagtacaagaggactgaaattcatggagaaagaagtaaaagggtggttgccagaagctgggggaggaaagatggggagttattgcttaatgggtacagggtttcaatttgggacgatgagaaagctctggagatggacactggtgatggttgcataacaatgtgaatgtacttaatgccactgaactaaacactttaaaatggtggaaaatggtaaattttatgttatgtgtattctaccacaattttaaaaaacagtgcttacaaatcttagtcgtgcgctgctgtcccctgccaaaaaagtgtcatttcagctgcattctaaaggaggggcaggacacaactcatccactcatttgctgcacaatagttgaacagcacctgtaaggcacaggtttggaagaatttctgtcttctgcgtctcaggttggataaataaagcaagttctctgcctcacagtgcttcagtccagctagcaagagaagcacgtctctctggtatacagaagaatgaatccagaggggggacccacacaactcagaagaaacacaccaaggagaaaggcagtgcatctggaggacgcagagaattaatgctctttggagaagtggccacaacatgatcttgagaggtgggggcacttgtataggctgagatgggggagaagccagcccagaaactgcctctttcctggatgacctctgtccccaagaccatttggggcaaaggagctatttactataggaagtgaagacccatttttctcccagcacctttggtgcccagaacagcacttggcacaaaaataagtgaatacgaaatggtatctgtgtgtgtctgcaccacgtgccacacacctgggtacacacatccactgcagagggacagctcaggttcattttttcctcatcactccagggaacaaggcaaggcagggaaggtctagagccctgtggcagtggggcaggggggcatgggcaaagaaggagaaagggtgcttctggtccccttgggggacccttctgtgggaagcccatgcacacacacactcagaggcacacaggccacaggatcaggtaagaggcacagtccccagatgaaggcaagttctaaaaacccctttagcctcctcacccatggaactgtggactcctaagctgtgttggagtaaattacttgcttaatgagatttcaattaataaaaacaaattaaaatcactttggtaattaagctgctgtgaacctcgccagcagctctccctcagacctcagatttccatggggaaggagctgggaacgggggtccacttggactcaggcagcagtgctgctgggacctaggcggcagggggctcctcgccttggggcttccaccccaggagccacagcttcctcaaaccagaggtgggtgtatgggagggtgcagtacacagcaggcagcacaggctctaaacttccattcacatcgaagccctgccacttggtggctgtgcgacctagggcatgttaattaacctgtctgagcctcagtttcctcatctgcaaaatgggttaatactagtaacctacatcattgggttgtgggaagattaaaggaatgaacgcatgtaagaatatagaagagggcctgtcccacagcaaggggtcttaactcactttaccctgtgtggtgctatggggggacttttccagtctttatgatttgccttgtcctgaaccccaaacccctccaggaaagccctatttctctgagttaggtgaatgaagacctacccacagaggttcccttggaggtgaggtttctccaagttctgtcccacccaggcccccatctcttttcatcagagccagcagctcaaatctgggagctataacactaaaatctcttgaagaacaaacactcctgtctctgggtcacaaaatcacccccattctcccacatgagagaccgggagggttaagtagtgctgatgtcactgaccccattccgcagatgagtaaaagggcttaatgacttacctggtggctcaaagagagaagcagtgcccagggctagctggaatctgagaaacccacattctcatccagtgctaacagaactgtaaacaatttcagcctttctggagggcgcaatgctaagtgtataataatttgaaattattaaggttttaggttttttttgttctttaaagtttgtagcatttacacttttgaagttattaaagcaaaaactacactaagccttttgggacagccgtgtgtgtgtgtgtgtgtgtgtgtgtgtgtgtgtgtgtgtactttacgtataacatgttttatatatatatatatatatatatatatatatatatacacaaacacatacacacacacacatcccaaatgccaaatgtcatttttctctgtggtggtagaaaatacagatggtttttgttttactcattcattcactcattcgtgcaataaatatttttatttttatttatttttaattttatgaagacaaggtctcacagttgcccaggctggagtgcagtggcatgatctcagctcactgcagccttgacctcccaggctcaagtgatcttcccacctcagcctcccgagtagctgggaccacaggtatgcaccactggacccagctaattttttattttttatagagacaaggtctctctatgttgcccaggctggtcttgagctcctggacacaagcaattctcccgcctcagcctcccaaagtgctcagattacaggcatgagccaccacacctagccagcaagtatttttagtgtccatgaaatagcacaatgaacaagacagacttaaaccctgtcttcgggaaactcacagcctcttgatgaagatggacattgaacacaaaacgacaaggtgaatattatagaagaggaagggcggggcctcagatgcccattacagaaggaagcaatggagagggtgagatttgccataaacatttatttcttttgtaattagactaaaataaaacaatgtatacatttttaaaataaatcccaagggtcccataactagttagtaacagaactgaaagtggaaactaaaagcattctggctcctgggcaaatgatttttttttttaactgacaccgcccctgggaagtttgaatagcatcctagtcttcagtaaaaaatatctcaaaactctcaaaggagatgtctgacagaggtggtcctatcatctatgcacctcgtgtcagatggaggagatatatccccattcatacatccatgtcagatggaggaggctttgtgcgcacgcgcgcgcgcgcacacacacacacacacacacacacacacgcccctctgactcctcctggcatgccctccttcatctgtgtggcctttctggatgatgagagatgttactgggatccagaaagggtcactccaattggccacacacatacgccccatgccagatggtactgggtcaatgggcagtgggtagctcaccaccactcatctctggaggaggagtcccaaacattccttgctctcagtggccccagtctctccaccagctgacctccagtcctgtttcaacccaccctggctgggtctgccatctgggggccaggcaaaagggggaacatctcagcacccagaacctcccaccatctgctccttcccactccctgagaagtgctaatctcgcagggcccttcccctgcagaccccttttccctggggaaggtgagggtggtgccatcctctaagtgcccagcttcggtgagggctgctggagccgtgatgccctccgctgggagatgccacccgattccatgtgccatcttctcctcccctcagacttcatgtatcatattttgtgctgacttcagacaatcaagggaggaggacacagagttgtactttccaagtagctggcaacccttaatcaatgttaattggctctaattagcatatgttaattaatgatatttactataaattaaaggtatgagtgctcccagaggtttcctgttcatccaattagtgccaattagttgcaattaacacgtgtaaatgagattccattgaacccaaaacaaacagcacagaatctctcagattcccccttgcaccttttcaatcagccagaggagggggtggagtgtggaaggtgagggagagacaggagaaagagagacgccccagactgatctcttgcaggaagctgaccctcccacccacccggaatgagagcggacagagccacactgggcagagcgagcccctgagcatgcccttctgcccctggctctccctagggagggctccctaagggccctggccttgagatgctctttagagctgagggccatcccttggacatctctgaacctgccagggcttaacccagtgcatggcacatagtaggtgctcagtaaaaataaaactgggggccgggcacggtggctcatgcctgtaatcccagcactttgggaggccaaggtgggcggatcacccaaagtcaagagttcgagaccagcttggccaacatggtgaaaccccatctctactataaatacaaaaattaacctggcgtggtggtgcgtgcctgtaatcccagctactcgggaggctgaggcaggagaatcgcttgaacctggaaggtggaggttgcagtgagcagagatcatgccactgtactccagcctgggcgatagagtgagactctgtctcaaaataaataaataagcaggatgaattaaaagttggtttccttgcatcaaggtccaatatctttaaatatataaaattaaaggctgtaatggttttttttaaagcatgcagtgttctcttctccgtaaggtcttcccaaggggcctaccaaggggcaaagtaggatttgcctctatcacgtaattttaatataatctatatatgtccacagagattttacttcactgctaatgctatttcttttttactcaactactctctgaggcccaaacctctgccatggctagagaaaccgctaccatgaacagtcaactgctacccctagccaacccagcggctcacacatgtaatcccagctccgtggctcacacctgtaatcccagcactttgggaggcccattcgggagaatcacttcaagccaggagagcaagactagcctggacaacgtagcaagaccccacctctatctttaaaaagaaatgccacctcaaattatccaccacacagaaccctctgtaaaacggtgatgtaagatatagctcccaataacttttttattcctagtcactttggctacaccaaacttttacattaatgttgatattcattaatttattttagagacagagtctctctctgtcatgcccaggctggagtgcagtggtgtgatctcggctcactacaacctctccctcccaggttcaagcgattctcctgcctcagtctcccaagtagctaggatttcaggtgcccgccaccatgcctggctaagcttttgtatttttagtagagacagggtttcaccatattggccaggctggtcttgaactcttgacctcaggtgatccgcccacctcggcctcccaaattgctgggattacaagtgtgagccaccgcacctagccaatatgtattattttaaaatattgactgttgacagtgtcaggtgctgcttcaggggctggggatacaggagtgaacaaatcgtctatgaatcctggcccttgtgtagctcacattccaccgtgtactattacctcccaccttgggattcggatgtatctagagtcagagtgacttgggttcatatcccagtgctgcctctcagcagctgtagggtagggttatttaatctctcttggcctcggtttatttatctgtaacatgggtatgctgatacctatctcagaggcatattatggggaggattaagctccttcccttgtcccattccctggtggggcagagtttggagttaagccacaaggaaggtagaaaagagggaggcaagggtgcggcaaaccgacaaggcacatgtatacatatgtaacaaacctgcacattgtgcacatgtaccctagaacttaaagtataataataaaaaacaaataaataaaataaataaaaaactattaacagaaaaaaagaaaagaaaagaaaagagggaggtaaaagccagaagatcactctgggctggcaaatgaatgtctgattaagtcctcctctcgacgtctgggttggctatcccggctggccacgacagtccctcctacctgcgcggcacttcacagtctacaaagctattgcgtgactagcctcccagcaaattctcatcagccacacgctgggttaggaaagtgggtccaggaggaacctggtttagaaagggggagtgtttctactataaagacacatgcacacgtatgtttattgcagccctgttcacaatagcaaagacttggaaccaacccaaatgcccatcaatgatagactggataaagaaaatgtggcacatatacaccatggaatactacacagccataaaaaaaatgagttcatgttgtttgcagggacttggatgaagctggaaaccatcattctcagcaaactcacacaggaacaggaaaccaaacaccgcgtgttctcactcataagtgggagttgaacaatgagaacagatgaacacagggaggggaacaacacacaccagggcctgtcggggggtgggaggccaggggagggatagcattaggagaaatacctaatgtagatgatgggttgatgggtgcagcaaaccacaatggcacgtgtatacctatgtaacaaagctgcacagtctgcacatgtatcccagaacttaaagtataataaacaataataataatgaaaaaagaaagggggagtgctccctgcatcatgcagggctgaagcccagacatctgactcctcccagcatgccctccttcatccatgtggcctttctgagtgatgagagatgtcactgggatccagaaagggtcaccccaactggccagaagcagggattcacccacttatgccaaaactgaaggtgggtcttgcatgttgaggcaccagggccccttcagctggagcaagattgcctccaggtcagaggccacagcacccatagctcttgcgtcccctcctttgccatctcaacactgcccccactcttggatactcacgcagggtgtttgatcatttcagattgcctcagcatcctcttccacaaagcaagggggtatgctgagatggccctaaaaccttttcgacctgatgttctaggattttggaggtcctctgcagagtgctggccccacttctccgctgataggcaaccatagaaagccttggttttcctcctccttgggggagctgtcccacctgtgatggcctaacgggtcctgctcaccctcagacctttctcactgattcgacgtcatcttccacccccaccccgaccttccctgggatagtgatgaaccaccagacatggtccccaagagacccagcctcagaaaaagttctccatcaccctgatcagaccaaagtcgatttggaggccagggggaggacgggagccaatggtgtttagtaaaaagagctcaagtgggttatcttcagggaggggcatgtggctgcagaatagatgtctgtcctgaggactcttagggctcgctctttcttccctaccgctgcaccccaccccagggccagcagggcatgtgggagggagtctggaagcaagtgaaaagaacgctctcctgagtgctcttcctcccagcaaaaataaaactactacggttggaggcctccctgggccaggtacagtgctaggccattgacttgcatgatttccatttaaagggggtggcatttgctccattttttatctctaagtgctgtgggcatcttggtctcggcctggtcagctttgggactgatgatcagccaattctggccatggaataggaaggttgcagtacatggtgaggaaaatgctgcccactgtgtcccaccaatcagcacacacatgcacatgcgcacacacacacacacatgcacgcacacacacacacacacgcatccctctcctctctcttggccaggtggatgctggctccatcagcctgggctgaagctagatccagggagaggaggctaccactaggaaggccacaggtaaaaagctaaaggaatcagggacatgagtggggcaaattctcagctttcaatgacaagaacattgcctccaaaccagcaattatgggtgcccatgaaactcaagggtggagaaaagggacactggcaaagtgtctgctttttatcccactaatgcctcttgagaagtgatatccctctaaagccaaagttcctgagatgaggtttaacatggccactttggaagaaaaaaaaaaaaccctcggctccaggaacgtaacaacagaaaataattaaggtctaataaggtcagtgttccaccttaacaccttttcagttccagttaaaacctctactaatttgccaagaaaaaccagcctcacttgggccttattatttgaatcacgtcctgtctcttaatttaaacgagagactcacataaggatttttttttattttaaattacaatgctgactttcttccagttgattacggtatatgactctctgttagaaggccattattttttgctatgatttacaaagcatttaaagcgaaatcaatgtaataaatatcgaagtattgtaatagataattccatatatttaactggagacacagcacagccctggttcaggcagtcaggagatgagcagggtgaggacgggatgggggagacagctggtatccactctcttcttttctccccttttcttttctctgtattcatttagccaggattcacccagccctccctaagattctgcacactggacttgggactgtggggagtcatgggtgctcaagacgcattatccagaggccgtgggctgtttgaagaaattcctctgcaacaactggctcatgaatactggaggccaccgtgggtgggaggccacactagcaccctctaaggagctgtgatgagagaagatttctcatcacagtggaggagaggtgtgggtggggggcaggtcaggaaaggcttttgctagcatctcctcctttcctcttcctgctcctcccctccccttcttaactcctcctttccctcctcttcccctcctctgccctcctctcattcctgtctcttccctccctggactgagctgtctctaggcctctggcggcaaccagcacatactggcctctgactggacaagctcagctcaggacaatcagcccagcatttgcagatgtgaaagcccccgaggagggcagaagtgtgaaggtggatagggtgcccagccttcatctgccctctcaagtgtgtgaccttgtgttcacccccagtgacagagctcacagcagtgtttgcagggccagtcgctttgagactgcctgccctggggcagggagcaaatttcaagctgccttccttcctgtgcacccccatctcaaaaaggacccagaagcaggttcctttccagctagcccctgacctgccactccatgaggagcacccccagccccgccacttcttcctggcctcagagctattgtgtgggggtcacacatctgctcccaggtgggctctgctcccgggttcctggctggattcagaaactcatgcccaccagtgagggggccacacatgggccaccagcctatgggtgggtccagataacacatctccactgcaagtcatgtgttctgtctgcagagctattcgagtgccatgggatcttaataagggctttgtggactcaatgctgcagctcgtgatggggtgtgggtagcacacttttagcagatcccagagaaggaagatgtatggtcccttgccgtaccaccccaagcctgaacccaaagccccaagtccctagctctgaacagatttcaccataaatcccaggaggggacgggcagagggaaagggagcagagaaaagagatttacagcgaacttgcttcctgacacctctttggcccgtcccataaaataacaatatcatcagataaatcatacagagtctcaggggaccttccccttgtctttgtggggtctttgaggggagatgaggagacatggtcaggtccacccagctgcgttctccctggcaatatcagttccagctgccatgaggacgtctcagatttaatccctgggctatgtatggggtggtggggtaggaatgaggtagggaagaagagtgttggctatggacacccaagagacagcatggcataagagattcagcatgagctttgagcaaatcccggctcaaattcctagctgtgtgacctcagacaagttactcaacctctctgggccttggtttatttctctgtaaatgcaggacatggaatatctacatgacaggatatgtatgaggagttattgagaataatgtatgccaaagctggtgtatcgtaggtacttaaaatacgggaactaccgtagccacaaatgttttctctcatctaggatataaaatgctgtggccgtgttcccagcagagggaatcaaatgctgagccctctgcagagacaccacactcccttgtcctctctggctattgtctcagccttggtctttgagcttagaaaggcagagctccccattaactcacaatgtgactgtaaacaagtttcttcccctctccaggcctgtttcgcatctataaaatgaggaggtggaaagtacttggtctttaaggcccagtccattgtaagataaaatctcaaatcaggagaaatttctaactgtaaccaaagggagcaggcaggacccagacgctgcaggcggtgaagccagctgaaactggcatggtcatgcagcctggggcggacgctgttgccatcctaggaagagagtgtagggctccatccaaccggtcccacaactctgaccaccccaagtgagagattcctctgtctgcagcctgcatggccgtggacacagtctgcggcattgcaccaagggaccttcgtccagggggagggctgtgtttccagagctgggagctgggtgggtgaggctccatccaggctcatgcttcgtacctggagcaacctcgtacttcccttcctgcctgtgcggtctcctcctcccgccagtcctccccaaccctgttttttcccctcccttcagcatcttcagctattaaggatgatagcttgggcttgggctccagccttccagcctctgccctctctctctctccctccttccttctttcctttctcctcttgcttttccatcttctccttgtacttcatttcctcctctctttccttccttctccagttcctcccttttcctccttcactgtttgatttttagccctctgattttttcttcctcttctccactctttatttcttttcatcctcctcccggtccttttttctgctttgtcacctccttcgttttcttctctctctggctgactcaggggaccggaggtgggcctatctggagtgagtgagtaagtgtgttgggaggtgagggtggagggctggaggggggcagtgatctggcctgagcccctccagtattgctccagccccagccgcaggaggatcaggagttcacccgcagggcagctgtcagcggctcagtggatggatgagtgaaagtgtagggggtggggaggtgaagttgctggagagggggccctttttaaataaaaatgaaaggagcttggcggatgaagtgacagggactgtttcataataagccccacccaaggcacctctgccaggggacccagccctgctgcccacctccctccaatcctgtgccctgtctccatccccaaagtttctttcagcacagagcctgtttgtttctctgatcttctgggcaggccagagagcaggcaatcccccacactcaactccccagaaccactccccgcccagccttccccatctcccactgtggggcggctgggattggaaccctgggcaacctgctcacagagtgatgtctgggcagattagcaccccaaagctggcaggcctattaggaggcctttgtgggggaggagaccaggggaggcgaaagggattttccattctctgagcaactggattacacagtcaggggatcagggaagaactgctacttaagctgcctctgccctggctctccgcctctcacgggctcagcagggatcttaccaagccctgccttgcctgctttttgaagaatctttatgtaacttgagttaggtttaggggcaaaaccaagtctcatctcctgcccagccctgagctattacaccaaacaggagctcaagagggctccgcttgccaccacttccgccaagcctcaccttccacagagcccccaggtctggaggtggatctggaaggtgtgactcagaatggtgaagtgacttgctctgagtcacaccatgagtgaaaggcaaccaggatagctacctgactgtggactggatttatgggagaatgttctctgaagagtgagccaggtctgtgccagggactggaaggggcccaaggctctgctgttccccctacaagaaggaagtttgcagtctgggcacggtggctcacacctgtaatccgagcactttgagagtctaaggcaggaggattgattgaccccaggagttcaagaccagcctgggtaacatagggagacatctctataaaaaatttaaaaattagccaggtgtggtggcatgttcctgtggtcccagctacctgggaggctgaggtgggaggataggttgggcccatgagttggagccatgataatgccactgcactctagcctgggtgacagagcaagaccttgtctcaaaaaaataaaaaagaaggaagtttgttcctgagttttttgtcagcccaatatatgctttagagggaggggaaccctactcccatttgttctctcaggctgcagaagaccagaccacagtggatggtgaagaagaggagagatgtggagaagattaggttgaaagagtcccaagtcttaaagcctactcccagccttatcactaacttgctgtgtgaccttggacaaaccacctctcctctctgagcttcagttttcttatctgcaaaatggagatgaaaacttctctttcaagcattgtcttgaagggtgaataagacaaggtactagaagagcatcaggcacagcccctggcacatacagctgctccctcaataatagtggaagcaaagtcttttccccaggagctgctggaagcagaatcttccacccaggagctgtgcccactccctaggatagcaggctctgctacacagccaagcaactggttcttcccaccaggagggcaaatccatcagattcagcaagattggcctccccagcctggcataaggttactggggggtcatgaccccataccttaggtccactttctagaaacagtccgcacacaagaggaccaaagacccccaccctagccctgtgtggcccctgaaggccttttgctgacaaagtggtcatctctgaccttcctgatggcctatgctccttccaaccagaaaatgtctgtgatcctgtgacccctagaagccctgccttgctaatggttttatgatcttccctacagaattctctctttgccttctatacctctcagcccctttcagtaggtcctagtcaaaataaacaacatttatgaccagagcaagattcaaggtctgcattgcaaacaaatgcagagctctttgaaggtgcctggggaatccatcacttcctggggtgtgacgttccccaggcccaaggggaggtaggccctgggaagggactcaagcctgagaagctgggccctggatcagagtttagagtctgaggatcccctactgcctctccctcctcagcaccaaactcatcctctatgcaagaggagaggggaggggagaagagggactgggcatggcatgagaggtccgctgtgcccagcaacctctcctacgctatgttcaaggccaccttggtggccaggacttgatccatatgtcatcaggggagaagacaaaatgaaagagaggggggaaaatacagagataaacaaagacacaggcagcaaacaggagtgaatgagagggttagagaccaaacccaagggtctcagccttgatccctactctggcactcacctggacagaagagccgccaccatggccacgctgggacaactttcctaaagaaaactcatccaaaactctgcaggccagtgtagctaaagggagagagggaaagagagaagcaggctcccgtctgagtttctctcggaggcctgagtgagtgattacacagagggaaaagtggaggccctccatacagaatgaaaaccctctcctccatcccaccacagatgagaggcagaagccctcccccatactctcctaaacatcctccaacagagaagcggcccgcaggcggcagctcaggctgtgttgtctcagttttgccttctgcacgctactgtggatgagaggcagtcttctctggcaggtgtggtcacggagcaggtttgttttcaagggggactggccctgcctggggaactgttagtggagaatattaatgtgggattcccaaaggcccaggtctgagagcagctttctaggacacacagctcaatgcgttcttcagcaccatgccagcctccagaactggggcacgggcctgggggctggtgttctctgactcacagctgggcttggggggtggggggagaaaactttcctcctggagcctgtgccttatcatttaccctgctaaaaatattatgctatccaacaggttgggtgaggagctagccaggaaatatgtgtgggtagcaaaggtatctatcacatttatcagatccccacgaatagtatttgtatatgtggcatataattaatgttcgatgagtgagtcagagagagataaattggaaaggaaacaaagaaacagaaagagagctggaaatgcaagtgtgagtgtttccaggataaatatactttgtttgaaattattctttgcctaaactgaaagaagaataatttttaataacttttaatgaccttatacaagtaaatgtagatgtttcatcagggtgccctggtacccagcacagtgctttttgtatggaaagtcctccatgtcatagagcttttggtctagaagagccttggagaccatctcagccactgggtctcaaccttggttgaacatagaataacctggggagctttaaaaaaaaaaaagatgcaaggaactcacctcccagagatgctaatctaactggtctggggtggagcccagacatctgtattttttgaaagctccccggatgattcctctgtgcatccaaggttgagaactgcccatccaggcccattctttttttttttttttttttttttttttgagacagagtgaagtggcgcgatcttggctcactgcaaactccaccctccgagttcaagcaattctcctgcctcagcctcccgagtagctgggattacaggtgcccaccaccaaacctggccaatttttgtatttttagtagagacggggtttcgccatgttggccaggctgctttcaaactcctgacctcaggtgatccacccgccttggcctcccaaagtgcttggattacagacataagccaccacatccagccccaggcctgttctttacagatgtgcaaactgaggcctagagagcaggttgcctagatccacacagctaattggcagcagaatcaggatcagagaagctaatcaggcatcctgactcctatatacctctctgacatgtttgtcaaatgagcaaataaaaggttgatcctcttttggaggcatctgtctgcagagaccagctaccccaccccctctcccactcctacgttttcatattattttcatcagaggctagacaggctggcatcttgaccctgatcctccaggcttcccatcctgaaggcctcagggttcacagggcaaacacacagttcccaggtaaaaaaaactgtccaccacgtctggagcctccaagagtaacagagcagctgctgctccatggccatacggagcgtgtcagtgaatgttagtgtactccccagagcaggggtggaggagtgtgcatgtgtgtgtgcaaatgtgcacatgcacacaaatgcacatttcaggaggagactgggcagaacagtctcctgcatgtgggcacacatccttctgggaacatcagcacttggcagtgagagtaccaacatgtgtacacatacatatccacatgtggggtgagacgcatgttgctgttagcatccgtctatgcaggagggtaggtaagtgtgtgagaaaatgtgtaaatgtaacaaagactttgaaaagcggcctgtgtgtgctgctacatgtatctagaatcgtgtaccagtacagaaatctgaatctacatttctaaaatctacatttacacttacctgtgaaggcatatatacgaaaatatgtacatggctggctggccatgtgactaagtgtgactggcagtctgtgtttgcaggatgcaggtttatgtgagagagaaaggtttctgctgtttctatcacacttcccctaagtaatcactgggaaacatatatgttggaaaactgtatctttcatgcttaaatatatctcagcatatataaatgaaacatgatactgtgccaactgagatgctacacattaacgttgtttatcattgatagaattaaataacccatgcaaggccctggtagcatttcttacaattttatttaacactgttttggccaagcagcacttggcaaacacacatacacactgtggcttactgtaacaaatgcacgatttgtaggacataatacacaatacaagaaaagtataacaaaagagtgtcatctaaaaattccaaatgacccccatctttctttggggctcatcttattccccttccttccctaaacctgacgaaaacccatcccttcacacttccctaggaggtctctgcattcgtgctaaagacagataaagtggagggtgaggatttgaggtgggggaagagataacactccaagacctggtctctggaatgtgtctactcctccccagtctgtcagaggcaggcccaagccccagcatgtgttaaaactgagagaccaaagaaagcatttttgtataggttctgcagaccctcaacattgactgacatagttactcattcagaaggaggaaaaggagcttcgtacttatcagattggtaaatccttcattaaaagattaatataaatagttccttgcttttatttctttctttctttctttttctttttttttttttttttttttcgagatggggtctcactctgtcacccaagctggaaggcagtgagtggcatggttctcagctcactgcaatctttgcctcctggactcaagtgacctcccacctcagcctctcgcccacttttctttcttatggggaaactatatccttcctggagcctaaatgagaacaaccttgcacacagttacaggcttgccagctcacctttcaaaatgcatgctggtcaatggactagaatgttagctaaattatgaatggcctgagggaaaagaaaaactaagagctgggaagctgggctcttcatctacacgaccaaacttgaacatgagcaagatggtaggaccaccaataaccatcctacaagctgaaaatgcaaaatgcttccttccttaccagccactgggcagtgaaaagaaatcacatttagtcccctgaatagatggcacttgtagatcttttcaaacttgccaaggacttcttcatctcccaagagtcaggccaagatcccacagggaacctcaaaactctgttccctaggatctgtatttttgtttttgttttttaaatttttttttaagtttttatttttggagatgaggtctcactatgttggccaggctggcctcgaactcctagcctcaagcaatcctcccatcttgatctcccaaagtgctgggattacaggcctgagccaaggtgcccggtccctaggatccgtttttaaccatccctgggcttcattttggcacggcagtaccaagattgagacaagaaactcttccctatgcttgctttcctgtgttctaagtttctctcgctactttttctcctatggagaccccttaggactgtaaaataaaggaggccaagtccaatttaaacagcaattggacttaactccacccctgtgccccaaatcctctgccactaccaacgaagcagtcatcagaactgtctttttagacagcccccggcccctcttcaaggacgggcagggctatcagccaacctgtttgggagacagctgaatgtcagcaccagaaagtattgtatcatcttcgcaccgctggagtcaggaagtggggtctccagagcctggtgccagggcctgtctcctgagtgaatacagaaggaaaaaaagtttcctaacatttggattcaaagtgagaacggtgagtggcacccatcatcactgtgcgtgcaaccccaacaaacacacacgcgcgcgcgcgcgcgcacacacacacacacacacacacacactgtccatgcagacaaaatcatgaatcatctccatggctgaacgttttagcgttcagtaatattctcagaggcccaaggttttcagccaaatcccaggtctgtgcacaaggacactgcataaatccctccccttatgaaaggccagtctgagcagatgggaccactcttaagtaaactgtagagccctcccttcatccatcgcggaaggagcagcgggggggctggccctctcagccccgagagcagagagcggcagaagctgttaattcttgaggctaatgttcacatctccaacttatctctccgaggggaagtgtccatttgaccacatgatcctccctcccctaccctcccccaaggggaaatcaaatcttgaagtgagaccggaagagctgctgcggaacgtgagcacgggagagctggtgggggtagaaggcggtgaggggccgaaaggctcctcaaacccagtttctttccatgctaaggctggggaaataacctcatggcaactacactttccgataacccgcctcattaatatttattaaacaaaagattattttttaaagaagaaagggccagataattaaacactcagcggaggtagatggcatcagttgggcttcctccaccctgttcttggtgtggcccccacccgcagcctaagccgaatgtgtaccttgtaccatcaacctccccagcccctgctcatctccccaggtgtgtcaggaagacacaaggcaggtggaaagagaaagagacagactcgggcaccccaggtgctcaccaggaaatgcacagactgtgaaattacaccagggctggacaacttaccaccacactggaacccttggggtactgaaataattaacttgctaatcagctacaccttgctctttctttcttcctggaaaaaaacaattgcaaatcgccttcccatcaggttcccatgtcagtcacttggagaccaacaatgcttttgaagaaatacactctctgccgccatgtagaccaaaatgggtcataccaagtcaggcctcctcctccccaacccttcccactaggcctcagggggcacacagagacacaatgtttctggagatgcagggttttttttttccctcccactgcacagagcttttccatgtccgctaagctttcttgctttcagccccctttagcctgcttgctggcactaaacagccaagatccatgtggagaaaagaggattgattagaattgcaataatgatccctggcatctgtccggtgttagtgttcacaaagtgttttcacacattatctcattcggccagaggaggtcggagctggaagggacctcagtaatcatttagccgaatcccctcatgttacagatgagaaaactgaggcccggaaaggctaaacgtcttccctaatggccagggacagtgtagccaagtctccaagctccttgtctaggaatcctgtgctgcttccaaccctctgaaaagaaagagcgtggtcacgtttttgcgccacagtagatattaaacaagtagatattaatccaaaaatgagaaaagtagaacatgagaatgaataaaagcaactcctgtaagaaatggcttgggttggggggcggctggaagtggggaagacaattagtctaagtcctgaatggaacacgttaattaacaaagttccccctctttttgtcccccttcatctctccacttctctccaggtttaaaaatatgaacattatgcagtttggaatctaaggcttaattcagctgcaggtcccgggaggagagggagtcttttcttggcttcagatctggcacctatgctcccaagggttggcagcatgacgggcttgtgtgtgcctctgtgtccactcaagacgttggatttagcagtgaaaaccaggcatcttgatcctttcacagatcagatgatttgcaaattaatggctcttttcccccaaggctctgaggaggttaaaaaagatttctggtgaaggggggtggaaaaatataaaacggggaaaggaaaggaaactgacattggattttgtgtcaggaaaatacttccctgtgaatggcgcttgtgtgcgtggacatgggtgtctgcatttccatggggctgtcgtgcccctgttgcccgaggctgttggaaggtaagcggttcctttgtgtgttcgtttattactaagcccaactctttcccctctaaaactccttcttctccctgttgagctgaccatgcttctggatttatgaagagagatgttttagcagaaatcccccagagtgtcccatcagccctaaatcccaggcccgctcacccccacaagaccccatgacacacagcatgccaacacggcttcctcttgcctatgcattagccatccattgtggcaacctgacatctctcacacataaaaccgtaagagagaaataaaatatctgtctcttggcgaaaataaagctttgcctccctcctgatgtataggatataaaataaagcctcggctccaatagtgggttttccttatgccagagttgcctttgcacacacggagacaatgaagacggatggtttgggacgaggcccagcctcctggggccgccttcaccctcttttattatagtctctcccccctccctgcctttttctttcttcttcactttctttcctttctgggttggatttgccttttatatgcccttctctttctttcccctggaactttatttctcctgctcactttctttctaaagcttgacagagatggtgggaaaggaaccaagtttctcaccttcccaaacatgcctgccacctctcctcacctccccatctccgatccccagctctctctggaccaccagcccctctgactcattttgctgctgctgctttgagatttgctttggtcaaatgtacaaatgttcccaagggacaattaaaaatgtgtttagtggtggggagggggtggatttttttctagggagctgcccttcctccctcctttttctctctgggctgggtggtttatagatctcagcatttctttatttagcctctgaggaggccaacagagcaaagctgccacctcacaggggtgagagttgacattcacctcccaaacctaagcctcaaagctgcattaccagacagactgtgggcgttggaccccttccagccaactcagctaccaaggggaccatcaagtcccagaccagtcccctgcctcttctccccagtctaagaactgagggtgctgtgagggaacatagggggcttccccatgctcacacagagagaccagaactgtcaccctcacagtcacagagacatgaccaccttcctgcctctcacacacttggcgctccttcccacagtgcatagagcccacctttccctcctttgtccctagaggcctctctcttgcctggtggcaactgcgcctctctgcgcctctgtgtctctcaacccaagtctgaggaaggttgtctctggaagcctctccccatccttgccctgacctcccaccactctccttccatcaaccccagactgcttctcagcccgttcaaaacctcacctgccttaggggactgcgggacaccgcccaggtccttggaagagttagtactgcctgaaagaagagggtgcagggtctgggcccctgggggaacaacatgggagggggagctggtattgcagggaggtaagaaatgtcccagggacaggggtggctttcagcctctgaaactgatctcccaaggtggagggcggtagaagggcttcagtgtgtgtaaccacatcaccctaatctgaggagatctttattaatgctgcccaaaacctggagggggaaggaaggcagcaatatctatggaactctgcccaaaagtggaggtgggggcagggcttagagctgccaagtccagaaaaaactcaatctcagtcccaaaggtcgttagctttggggttctctctctctgtctcccccaacttgatgtctctccagatatcggcagtgaccaccgccattaggtaaggggagagagtcaattagtgagaggattaattactgtgaggcacgagccccgtttgtcttccttactgggtgttcagacagaggaacacgggcacgcacccaaatacacattgttgtcacgccgtcttagacgttttatttatttgttggattcctgcccagagccgcttttccacgggcgcagagtctcccaccaaacacgctgcctctttctctcagcacgcactcgcctgtcccaaagccgcacacccccagacccgcgggacgccccctccgtgcctgcagggccctcggctccgcgcccgtccccgcggccttcttcgtggcagggtctctctctgggtctaatttctgtttcttttcctccacttctccccgcatttccccgacagatctttcctttctttatccccgcctgcttttccgcactccgtctcatcttttctctggttttctgcctttattttcttttcctgtccctctctcctcacttctgcctctgtctctcttttctgttcttcagctcagcgtctccctcccaagattatccacgtcctgtctttgctccgcggcgcggagctgactcgcaactggaatctccacgcttgacctcgctgttccacccgctccctgccccaccccacgcccctgccccccctcccccacgcccctgccccatgcccagggtccctccagcgctcgtgggaagccagagttgtttacccaggccaggcacataccgtgacgccccggcctgccggatgctgccctttcctggccctgcggtccctgctcccccttaaccagcccaagccccccttgcttataaaacatggccaggcgcaaagtgcacactggagcaaggtgccaagctccccacccaacttctcaccttaaatagtgctctgacctagggatctcggacaagcctcctaacttgggcctcctggccgggaaagtggagatagtacccttctcttccaccccccaccaccctcttgctatacggttcaggggagaccgtgatacaagctgtgaagtactgcacacgagtagatcatttccatgagagagtgatgggtgagattaaggcaatttgagtccggagagaactagacgggaaggagaggcgggagaccttggcgctcagatccgagcgaccttatccacgcagttccctgcgtggcattaccgcggcctcaccgagtctgggcggagtttgcgtggcctctgggaccggcagagtccaggggtgctccgggctggctatttcctccctcctccgggatgggtgtagcagggtgtgtactccgcatggggtaacctcctagagccggctacgccccaggcgcctcctttcacggccttgtcactcttttctgctccttgggctgttctggaaccgaagagagaggagggaaatggctaggggcggccatcatcctcgggatcaatagcagccgagagtgactgggcaggctctgtccatgggccgagcgtcattctggaacctggagggggcgggggcgggggaaggaagggaagtggaagtttgagaggggcaccttcaggctccccaaactgcatggcagctggagagagctgacagaaccctctccaacccgggttctgaccagggtccctctggggctgatcgtcaaggagcttctcaagaaaagaaacctggactgtgaaagtcacctcctaggccctctggggccgtatccgggggtgcctgggaggagggtggaaaggattctgcagtcaccgagctatgggcgaaaatgatccccgcggaccctggtccagaatgtacaggtcctgggcggtgtaagtggctgtgggtctgtggaggacattgggtaggaaaacgcttgcgtagttgaggatgcagacaataaatgtggccgggaaggtgaggagggaaggttggtgctcttcgctgaacggaactggcttaaatgcagagctgagctgagcggcttcggagaaggcgaatttagaaagcctggtcaattttctctccatgtccctgcgaccgattatgttttaaaacaaaagctcaatggaaacgaaaacaaaacaaaacccaccatttgtctaatgtgctgtccccgtggaggagttaaatctggactccaaacctagaatctggagccaagaggcgcactttgagttgcgctcctggccccccttgcagagacgccagggttggctcctgcggacctgtttactgagccatctggacaccaggacgagcggagcctgacgccctagagcgagcgtcctgtcctcatcctcaactctcctgcctcgctggtccgtctgtggggaggggccttctttcccctatacctaggtcccaaggttcttacacccctaaatggatggagcaacctcctcctgcccaccagagggaggtgacaggccctgggttggggaagggccgacagctaggtccagctgtcgtccggtaggtcccactgaccgccccacactccaccgtgacccctctgctttgcatgagaaggagcccagctgggacgggggcggaggcaagccacccgggactggggccactatagattccagaaaggggcggttgggtcgagggcgctggcggcgagaaccgggacagctgcggggaggggaggagtgtgaggacagcagggctggactggccccctccccgcaggcctcacgcagcgcagcaggctgggaggcgcctgggggtccgggtggaagaagtggggaccccatgccacacggcttttggcgcttgcgggggtgccagaagcctaccgagtaccggtcgtcttccgccgggaagtgccgggtccgcaggaggagcgcgaagccgagtccgagcccgcggagcccgccccctagatcgcagaaccgccttctccatcctctgccctgccccgcgtcggggtctgggagcgaccggcggaggccggcggcgcgccggagctgactagtcccctacgctcctccggcccgcagcggggagcccacatgtgtatgtgcaagaaggtgtggagaaggcgttagggtcccggcacccacgggtcagggcagaacgccaacgagtcgcactgcgggtctccgcggcttcggtttccatgacatggtgacgccggcggcaaggcggggggctgcctgtgggccttgaggttgctgggcggtgcgggcggagtcagcaaaggggcgttggcaaagccctaaaaccccacggttccacggagcgcaagccagattctctgaagcagcttccccgttcgtccgaagagggtattccatctgcacagcgggattccctgccagcccaggttcactgcgactccgcttccccgagcatttcccccgtttcagcttccgtctggtctgcgcatcgcgagtggggtccaaaggccaattccacaataccagccagctccggagggacgcccactatcactgccttccatgctcgggccaaatgagccttcctagcaccccctcccccgaagcacaaaaacggggagcaaaagtgggaccgcccagcccaaccaccttcagactccacttcaggagaaatcctggttaagcccacccagaacaggtgtggtcgaaacggaatttagggtttgacttgagtgctccgaaaaactacagtaactcttccaggcgaaggcactctagaccaggatctgtcccccacgtgtgggaaaataggcccctgggggcggcggtcccgagttcctagccagagcgggattagggagttacgggttccctgaggagtgaactatggagggtgtggtttgctgttgtctggggaagccggtgccaacccgaagcctggacaggggaggactggaatcccggcacacgctgcccatgcactgcacgcccatctactgcagcctcttcgtggcgtcccggcacccccccctcctccttccctcttcccaacgccacgaccaccacccccagccgccgctggagcccccggtttcccgcctagtcgtttgtttttgtacgtaaaaggtgtctccggatcacagttttctcacaactttctcgccagggttgcaactcctcacccgaggcgcttcccggtccactccttcccccgcgccggcgccgcgcctccggtctccccgcccccatcaggaaaccgcccgaatcaactttgcaagagtgctctgcgggagacagacactcagctcgcccaggacccggaccctgtggactttggatggattgggggagggggcacagaaagagggacgggaggagggagattctgctgctaagagcctcctccccctccaaagatgtgcgctgcgcttgggacaaacttccagctcaagaaagtacggggggacaatggcaacagccgctgaattgcaaagcccagcagtgcaggggagccgcctgggattccggacccggctgcaccccaaccttccacaaggctcggtcttggactacccccactctacagcagaactctggcctccgcctgcgcctattcccgctctctctctgtccctcccatcgaaacccacgccttaccggagcaggagggggcccaggcacggtgctgcccgccgtccgcgccgcgcggggccgcgggtgccgccgccactgatcctctaaacgcggtctccccgcactctcccgggccgggggatgcagaatggtttacagagggaccgcgaggcgctgattggtcgcaggccgcagtgacgtcagcgggcgctgcattaaggcgagggggcttccagagctcagccaacagccaggagcagtgaccaagccgccggagctggggagagacgcaccggggcggcgactgggccaggagaccagggactgagggacgcgcccggggagggccagcaacgagccgcggcccgggcggcgacagcggcggtccgcgccgagccgttccagccgccggcctactgtagccgctgcgccaggacatttttttttaaagctctccaagctgcccccctcctccccgactcctcccgctgcaaaagaaaaacaaaaaaaaaaaaaggaaggaggctagaaaggaaacccagatttgccaccacaacgaaaaaaagaaggggaaaaggaaaaggagagaaagtcgagcgactgtggggttagacggaggcagacagagcgtgggccgagcgatgcggggctgtgcgcccaggcggccgcgagttgtgactggagccacgatgcacggccaggcgcggtgagaagccagcccgtagtgcctcccgaaggagcccgggcgcagggagggtcgccctgaggacacggaggccgccaggcaggccaagggccgaggtgactgggctggggcggtagggaaggagcgagtgcgcctggctgcctccgcacggagttgtccctctctgttttcgattgacacaaacacttctccaaaagcggggaaacctaagcaacaacagcaatcaacaccaagatcttcctcctaccctcccctctttcccttctcccgcggtcggccctcgccccctcccccaggcccagcgcgggcgctcggcgcgtccagacccgcggcgcgatgccggcagtttaggatccaaagcttctctgctccttttgttctttccttcccttttttaaaaaaagaggggggaaatcccagtggtgggcagcctggcacgcacacagtcgccctcataccccgacaaaagcagatgcactttgacttctgacagctctacctcaagccccggagaactcagcggcgctttcctcgcaacccgagctcggcgagtcgtcgtcttcttcttctccgtttttatttatttatttccgttcccgccgccgttctcgctgaccttcactcctccgcgggctctgagcagaagggtcgcattctctcccgcctgagacttcttttcctcgccccgggagctcaggcggcgccgctccagcccggggccccgggactccccggctgcacacttcactgagacgcccccccaggccccgatcagcctcgtttcctccaccctactttgatttcctggtgcgagttttggcttgcacggccgagtgtgtgtcctctttttggagagactggggagctcgtgccgattgtcttcaggagtcatcccctgggctctactttgcccctctctctctctgggcctcatcagaccaaaccaaagaccatggttcactgtgccggctgcaaaaggcccatcctggaccgctttctcttgaacgtgctggacagggcctggcacgtcaagtgcgtccagtgctgtgaatgtaaatgcaacctgaccgagaagtgcttctccagggaaggcaaactctactgcaagaacgacttcttccggtgagtactttcctcccacgcctctgctgctacctccccgcgggcccttcccggccagcttcggatcagaggttagcgtggcctcgctgcccagttaggaactgcttctagagagggcagccaagtcccgcgggcgcccgcctctccgccagctggcgcgctgggagcccgggacgcggccctgcttgcatcctggaaactatgggtctgggtttggctgcatgtgcctgggaagaaagggtctgagcctgactcggcccagaagccccttcaagcttggaagagacagggcagcctcgggcgttgtagcccggactgctgtctttcccggagccaagctctgcagcaactgcattctccaggccttcggggttgtttgccctccaggcagagcccaggctccctcccggccactaccttttccgaccccgagcggtcttggcggtaagctccgagccttttgcgtagagtgtctgggccaactgccctgtcagcggcaggaaagaactcggccttaaagccgatcctgcacgcccgggggtcttccccaaacccggacatgcctccgagtgcagacctggacaaactgctgcactgtagcctgcgaagtgcccggagctttttcctgcttccctggctgccgaagttgtctggtggttcggcttcagccccaggtgactccgactcccacgggctccgctcagtagtcctcctaggaaactgccagccacagccagcaacctccttgatgaaacctgggggaaagccgagacctccagcttgctggtggggagacttctccctaccccccttattcgtttagcattttaattatattatcgtacactcacaattttgccgctccattcacacaaacacacaagtcaacagagaagaacgggcacaaatgcgaattgtaattccaccctacggatgtgaaatatcgcaatttactcggctgacttggtctctgcttttctgagtttgtggtcatagttcaaaccagggagcaggaggaagagggattcaaagccactcagagggccaagacgcgctgtccccagtgccgctccaggactcgtggctggggttgggttgcgtggaaccatgaagcaaagctccgtgctcgctggtatttcgggagaacgcgcaggctgagcctctgagcctccgcgggctgcccggttttcctcaaggactggatcatagcgggagggtggcaaaccgtactcgtacccgctgccagtgggtccctgagcctggcttccacaacccgcggcagagcgcccagagccagctcccgcagctcccgcttttgccaacctgtcccgctttaggcaagagcgtggcggcggccccgctaaggctacggaggggggctctccgcggctatgtttgtttaccaacagcggggctagacatcgccaaccccatgcctatgtgcgggtccttttgcgatgaaggagagaaaagcggcgctccgcgcacgtttatatagagttctaattgtaattcgacttttctgaatctaatcggaaaataagtgccccgttccccccgcccacacaggtcactgccttgccaccttctttagacgatgcatctttcctctgggataacgctgggagtgaggctggggcttggcgggtagcttgggcccctggctctaaccgcgtgtatcccctccctaactcttccctggtgccgcgctctctctcctgctgcctcctcacctgcttaaccggaattctgcctctctttatctctctcttcccttctttctgtgctccattcctcctctcctacttcctccactttttacatcttccctctttctcgctgtcatctttctctccgcctgtctccccttgcccctggctgacccatccccgcccccgccccccacccccacccccccgcaggtgtttcggtaccaaatgcgcaggctgcgctcagggcatctcccctagcgacctggtgcggagagcgcggagcaaagtgtttcacctgaactgcttcacctgcatgatgtgtaacaagcagctctccactggcgaggaactctacatcatcgacgagaataagttcgtctgcaaagaggattacctaagtaacagcagtgttgccaaagagaacagccttcactcgggtgaggccccaattcctggctggctaggtgcaagcgggtcctgggggaggaaggctcgccaaggccccggctcatctgtcctttccctcttagccaccacgggcagtgaccccagtttgtctccggattcccaagacccgtcgcaggacgacgccaaggactcggagagcgccaacgtgtcggacaaggaagcgggtagcaacgagaatgacgaccagaacctgggcgccaagcggcggggaccgcgcaccaccatcaaagccaagcagctggagacgctgaaggccgccttcgctgctacacccaagcccacccgccacatccgcgagcagctggcgcaggagaccggcctcaacatgcgcgtcattcaggtcaggccccggcgcgcctctccatcccacagaggcccacactgccactttgggcacccaggccgagccaggagagcccagaatccagagagaagtgagagatggagtccagaggtggggtgcctagacacatcccgagcctgcgggacctatgaaatgcctgatgccttcgagcatctagaaagtcctcttcccagcccaacagaggtgatcgtggcagtggagggggagggacgggagttcagccagaggctggaggaggagaactgttgaacactctggagagagtggggagccctctttctgcacataccccaccccacctcgggttcggaagggtcagagaagtctcagtgtcccccagagtcaatcagtccctctgccttctgcacaaagtgaactcttcctaagtctgcaactccaactttgtgatcgcttgctccaattagacaagccccagatcagggacttcccctccaaagagaggtggttccgccgggagtcagctctgcttccagcgggttggagtgaaatttgggtatgggagcctacctggaggcagctgggcctgtgggcggaaaggaggtgagactgctgaagctccaggccagggggagtctctggctcagtgctaggtgtccggttcaccgggcctgatgccctgcgtggctgtgggtggatgtacctgcctgggaggctggctgtgcatgtgcacatgtgtgcaacacggaaggccctgaggcctacaggagactgtgagaacctgtgtacatgaatgagaagtcgtgtgtctgtgtcactattggcaagaggctgtggataagtatgtttggcactgtgagattgtacatgggtgtgaaaaggagattgtaggttttggtatcataggctgtttctgtgtctctgtcatggttggggggagggttgctgcaagagaccgtgaaatggaaacgcggtgtgtgtctgacattattttggagaggcgtagtctctatgtgtgtacagccccagagaagcggtaactgtgatagtgtgactgttagaaaaactccagctataccacaactctccccctccagacacggcggcctgtccaggtcctcctgtgggattcctgctcaccattggctcagggtccgccctgagtggtcctagtcagagatcgcaccgtcaccactaccctacacacacacacaagcgcgcgcgcgcggtgtcggctagccaggcggtgaaggggtgctggctaggcccggagcaccccggggtcgggggtggagtctcggtggcctcaccccgccgccatgtgctgcaggtctggttccagaaccggcgctccaaggagcggaggatgaagcagctgagcgccctgggcgcccggcgccacgccttcttccgcagtccgcgccggatgcggccgctggtggaccgcctggagccgggcgagctcatccccaatggtcccttctccttctacggaggtgggtgcgcgccgaatggcggggcgcggccaggtcggggcgggcttcgttggaagcgggtggcagcgcgggggggcacgcctcgctctctgtaagccactggagagttggggcgagtagggagaaggctgggagtaaatcaaggggaggcggcgagaccgaggacccaattcacggccctgaataacgggggtagctggtaaggggcagctcccgggcttgcgcccagcctcctccctgcacccaggcccgcgagggctccccgcgatccgcgagttccccgcgcggccttcctcagcccgccgaggtcgcgtcttccctccctttcggtcccgccggcccccggccgggccctgacgtcctgcgccctccccgccgctccgcagattaccagagcgagtactacgggcccgggggcaactacgacttcttcccgcaaggccccccgtcctcgcaggcccagacaccagtggacctacccttcgtgccgtcatctgggccgtccgggacgcccctgggtggcctggagcacccgctgccgggccaccacccgtcgagcgaggcgcagcggtttaccgacatcctggcgcacccacccggggactcgcccagccccgagcccagcctgcccgggcctctgcactccatgtcggccgaggtcttcggacccagcccgcccttctcgtcgctgtcggtcaacggtggggcgagctacggaaaccacctgtcccacccccccgaaatgaacgaggcggccgtgtggtagcggggtctcgcacggtctgcggagttcgtggttgtacagaaatgaacctttatttaagaaaaatagaaaaaaaaaaacataaaaagcaagtccccacccccttcctccagcctcgagaaccattctccttctggggagaccggatggaaaagggggacacgaaataggatccaaatcggcctcgaggtgggactgggatccgcgcactggctgtcgacgtgcagaactggggctccccaaaggaaacgcagacctctccccaactcccacctggacccggatccgtagacagaccccgcgggcgtgtgcgcctggcaggcgggcggcgaaaagacgtccagggcagccgcgggtgcgcacagccgttggcgatgccaggagccgtggggagggaggccgtgagcacagccgggtgaaggaagtgaagcggcccagggcgctcccgggccagccaggagggttctagctctgggatatcccttattagtgttgtctcagagttcaacaacagcgacaaaaaactcttatagcttcagaaacgccgacctgccgtgcatcaggtgggactatatatatattttttgtctatctggatttttggtttttgtttttgccaaaattgcaaaattctaaatgtaaagccctccgtatcaactcttctaccttcgcaaaactacacatacacacatacacacgtacacggacacactcggtaagatggtctccagccagaccgctcagtaaaatgacttgaacatcagctgtacaagaaaagtattctaccttcacacacaaaaagttaaaaaaaaaaaaaaagactattgaactaaaaacagtcaactgtttacgtataatgttaaattcaggagttcagtgttttactaatatatcctgttttgaaacctcttgttcgaaaacaaaatgttttgagcaatcaaccaaaattgttccttttcttttcctgtagatgttctgacagatttgcagggctttcggctcactgtgctagtatgtaaaaaggtgttgtttacacgaggcaaagagaaaacatgctattcagacagttgccaaatagaataattatagcacaaatactgtaaaggtgcctggcaccagcaacctgagaaagtgttaaaaaaaaaaaaaaaaaagtgttacaagatttaaaaaaaaacatctttgctaatttttttgtcctgttgaacattcatggaattgttaatatgacttatatagacccacacaggttttatttttgtgtctttaaaataaaagtccaaaatatttaaattttatggtcaaatatgcagtcaacagctgctactttttctttatatattaaatttctcatatgtcttttattgttctaataaacctaagcttgtgtgacctccagtgcatattagaccattcactgtatgaaagaaaacatgttgaataaatttgtgagtttttaataaaaatagaaaatctgatgtttagataattggtgtgttatttgatgttttcaaaggggaaccctgatggggagctgaatgggtcctcagaagccaggtggaaaagagaggcaggattgggatgatatatctgtttttgccttggctatggctgaaaccttttgctaatgccagccaagcttttctctgtggcttcctgctgttattagctacagatttacatcctgtggatttaactgataccgttgaagagatgtttgctgataagttaatatagaatttgaaatagaaatcaaatccatggctaaaaaatgagtggtccaggtctgtgattaggcataagatccaaggcattccctctttcactctccctgcacatgcaaaactgggcttgtatcagatacttgtaatacatagttagaggtggtccttttcagtttcatttcatttcctatagataatccggctttctaatttggtagtttgaaagataatgtaaaggctttctaatttggtggtttgaaagataatgtaaaatgaatgtatagtacagctagaaatgaaatactttaatccctttcacagaactgatatgaaattgttgttttatagtatttgttacctttgaagttccccagaaggaaaactattttgcctggcacaagatacatattaagtttctctgaaagatgaacaaaaataactaatatcaaaatcaaatttcaactcaaaaggttctaaaagtagctcgattctttccagtccttcattagacttggaagaaatttgaatattttatctactatgaaatattcttgtggatgtgtgtgtgtttcagtatcagatgctattagagttccaggatttcttttccatatcacctagatttcactctggattatttatttccttatttaaaaagtcaaaggtttgacattaaatggtatataatttccagtgctgttttcaaattttgttaagacacagccaagtttatctttcctgcagagaaggctttaaaataagcaatatttcactgcatccatatgatggcttatctaatgggggaggaggctatccgggaggaatctggcagtgttctttcagaaataaaaatgtatgaaatacagaggagacttttgaaactcccagcctctgcatgcagcacatttctttatttgctttatatgcaatcactggatcggcttgtttttacctttttagcatttatacacattaaatcctagctaacttattcattatagcctctactccctagccccctttaaagacattcatttaaatgaactgcgctcactgggaagctgcattttcctatcaaggctgctgaattatttagcagctttattgtgcaatcggggtatttgataagaagcgttttcgagttgggcacacgatgtggattcgattcttctaacaacgtggttgtggcgcagtctctcccctcgtcgcgggattcagaatcctggcgaaaacccgaacaggtggcaacgctcagcagtcaaatttggagccgaaggccccaaggaggaggcctggaaatgtcagggcctgttctccttcccatcagtgctgtgccgcccacctctggccccgaggtgcggggacgtgcggcaccatacctaggcggagctcccgcaggaggcgcagcaggagggaagcgccactgcagtcccctctcgcctgggagggcagcctggtttctccctgtggccatcttaaagccaccacctctgtgcctctcgccacctgccttcagggttccagcagcagggagccaccatctgctctggcgagggagctgaagctcacccacccaacttctccgggctggctgccgctggtaagctgctctaggtgaggcacttggggaagtattacctgtggagagccaggataggcattgccagggctggcacctgagggtggacagcatctgaagagaggcaagtgggaacttggttttcccaaactcttgaaactccttgtcaagtgagcagacagttgtttgggacaattggaaagtgtcaccccttgcccatcctctgctgtgcctaatcgcctgccactttgcagcccttggagggcagggagagggattgtggactgggcgcccctccgccttctctggagaaggccattctgttagggaactgctcacccttattctcctctccctgttcctctcatctgctctcatctctacatcagtcagaggttgaaactcctcgccacagtccactctccatctccatccctaccccatcaataagcccttcccccaccatctcaagacactggaatgcaggtagggagaggcccccagagggagtatttgagaatttgctcccctgtcccttgcctcaactactctcagttgcatcttaattcctagaattacttcctcttccctccactcctggagtcctctttctaccttcagtataaggtcaggcaaacattttggggggccctgggatgtgtgtgacagtagaacggtcttgattccttgctaaaatggcttcccaagtcagtagggaccaggacagagaagggagagtaagtaaacaggtctatggcattttctgctgagtgtttgcccagcacagcccccaaattgaccagcagtgtcctgtttgcatgacagcttagaggtggtctctgcagtgactcacctccctttctcttttcttccttctctttacctcaaaggccaggtttctaagcattgtaagtacccaacatagcaaggggataggattgcaggaggtagtttcttaaatgtggggtgggagaaacatttttgtcctttgaagccccatggcaccttgtcaaggagcaaggaacacacttttgcttgggaggcccggacacaggcacaagactgcaattatagaggataaacgaaaaactgttctcttaggctaagctctcttatggatggtaaaaagccgttttcttctcctgagtgccctgcctagcctggcattcttttccttccatgtctgagggggtttaccctcagacaggttctccttcccctctgcagccctggttgtcttcattcttcaagggccactttacagggacatggaacaggctccactaaagtggtgtcctcttattgctcttggccctgaggacatatgaagattgtgaaagtcagagatcctctcttcccttggttttcatgggagacagtagagagctgagggttccccagttgttcagctgtgggatccaactggcccgggctgtacccaaggggcactgccacagtgcaccactaacatctcttttctggatccttttgaggcagattctgtttagaggggtctaggtctctacaggcaacctccaacagataccataagaatagaccactttgtagtcacacttatcatcccttattgcagtttctgtttacatgtttgtctaccctcctaggctgattaccgtgggggggagaatccaacttacttatcttgtatcttatctagcagtgcctgccacatagtgggcagtcagggaatgcttgatgaaggaaagaggatgtaaagcgattgtgtctttccgtgtgcggggtgcaattacatttatactattaagtctttatattttgagtctgtccctctaacggtagacctgtatttttctgcatttgtgcacctgcttaagctgcctgagcatgccctcatctctgaacagcaaagataatcaataccgaggggtatgcagtggagtaatccacaccccaccccctttcccttgctcaggcaagggtacttagagacgctactgaaactatctttagccacagcgattcctaagtattcccattaagaaagacgccagcagtccgccacacacttacacgtgcatatccctgacataggattcccaaatcctggccgctgaagggcgggaggcgtgtgcccggcctcagactactataaattgcgaaatgacaaacctgctttgggtcccagtctctgcgtgcccgagtgcgcacccgcgattcgagcagcttaagccctactccctcctccttcccaaatcagccaccgtgggccacggctacgctatgctttattcctaagcgaatctcgcacaaatctcgaggcatattttgtacaaggggacactggccgcgcgcatcgcaatcgcatctcagcgacagaagcggtcacgtgccttggcgcgcttccgcaccgccccttcccgcgcactcgcacgcgcacgcgcacacgcgcccatacggctccaatcccttcaaccttctgcgcgcttccgccttcatgctagcaacgcccgcagtgacgcgcaggccccgccccctcccgcgcgcctcccggaagtggccggtccagagctgtggggtggcctccgcgcggtctctggcggagtcggggaatcggatcaaggcgagaggatccggcagggaaggagcttcggggccgggggttgggccgcacatttacgtgcgcgaagcggagtggaccgggagctggtgacgatggcggggccgcagcccctggcgctgcaactggaacagttgttgaacccgcgaccaagcgaggcggaccctgaagcggaccccgaggaaggtgaggccggactggggcaggccacgtgcggagcggtgggccaggccctgtggggcaagggggcggcgtgggaggggcgtgcgcgaggccgccgggcctgcgctccttcgcttggcgcagaggaacgtcgcctcccgcgagggtggtcccggcctcgggaggagggcttcggcttcttttcacacgcactcgaaacttggtgctcggctggatgggcggaacagatcgagggctcaggccgagaggagctggtcttcaggtttacttgctccaggcctgttggagggagccagagagtctgctagcaagttggaagttagctttgaggatgccctttctggtattgcgttagaaaggaggagaagaaagtcgcatgtttttaattcaggttgcccttcaaaactaagttggagactgatggaaggattttctggtgctgtttaagtctcttgaagtctcaagacacttgttcagtggctgacgactgagactcctgttctgtaagctgatgttcagagtctagctgggagtaatcccgctttagacttgagtcggaagtgtgagaaagggataataaggagggataaatgcgagtgctgaaccgtatcttaggaagatcagttgaagaaactcgggactgtttagccagaataagcaaagaaaactccccaaagaatgggacagagtgaggggagaacgtgatgactgatttaagatattggagcgactgtcacacattgaagaggaattcaactagtttgataggatccaagtcatagaaatagatcccactagtagatgccaggagtcaactttctgtttagaaacagcagtaagacagtgttctactttgggagagagtgaatttcctattcctggaagttggtggggatttcgtaaaggacgttcaactatgagataaatgggtcgaccagggttcccgttaaagtttctgctaacctggagattctgtttacttttccctctcccccgacagccactgctgccagggtgattgacaggtttgatgaaggggaagatggggaaggtgatttcctagtagtgggtagcattagaaaactggcatcagcctccctcttggacacggacaaaaggtattgcggcaaaaccacctctagaaaagcatggaatgaagaccattgggagcagactctgccaggatcgtctggtgagtagacatttttgaatggaactcttctcttccctaattttttcagggttaaaatcctccggtcatcccccatgatctttgcaagagtagtctgcggatcttttttttgagacagagtttggctcttgttgcccaggctggagtgtgatggcgccatctcggctcaccgcaacctccacctctggagttcaagcgaggctcctgcctcagcctcccgagtagctgggattacaggcatgcaccaccacgcccggctaattttgtatttttagtagagacggggtttgtccatgttggtcaggcacccctatctgttatcttaggagagaccattgatttggtattagaaagggtcttagaggttacttcatttcacttcataaggaatctaaagcccagagtgattaagttgctatactccttatgttcggactaatggctcaccctacagtggagtgacagagaaggcagtgcattttggctactggagagggttatgagctgaaaaaccactgtgtctgatgaacatgttatccttgaattgtgacccctgacctttggttttccaggacttgcattgaagcactgtgtgatattagttatttgtgaaactcattttttgccattctaaaaaatcacataatccttctcttccctgcaaaagagttaggagtctgtgcgcttatagttttaaagaattgtaaatttctcagagtggaagaaggggctagatatggtgattattgggagaatgtcatttgttttcctttagaaaggtcaggggtgtcatgttgagaatccacagataatataaaaggaactatcatttaggttatgatatctatgatttagtccttgatgtagttctgggagctcctgataagctcatttcatattctttgcctagagactgataaagggaccaatcatgagacaaatatgataatatttattgagttcttaccatgcgtcaggcactgagtttagctctataatttaagttctaagagcctgggacacagtaagtcctcaaaaaaaaaattataaaattacctggaattagacagatttttataaaaaattatcaccattatcactacatgtgtcacctaatttaatcctcccaattgcgcaggaagttattactacttagccccattttacagataaggaaatcgaggggcaaattggttacataagtttgctcaaggtcatatagttagtaagtggaagaaacatgattcaaatgtaggctgtctgactccaagatgtacactctagtaaactctgtatgaatgtttcttaatctgagaaatggcgtacattcaaagaatttaaataataatttctgtttactgttttggcacttagtttttgtatttatatttttggcagctttgtgtcttaagtttatatatacctttttaaagaagcgctgaagacctgtcacgctttcctaaaatctttattttattgaagaaagtttttggaaactggtccctctatcttagaatcatacttgaaacacatggggcttttatgttctaccatggaacagattggataaactgtaaaaacctctacatatcagatgatactctaagcataagtcaaacaaagagccttaactagcactctgtctactataggatcaagttcagagtcctcatgaaagacgagacctttcctgattagtctcatctcccatcacttccttgtgcatcctgcactccagtgcgttttcccttcattatctatgagctgttgccttatgcttcataagtaaaattataatgtctccttctccacatgataccatcccccacctttccaggagagttaggtggttccatctccatacactgtgtactaatgaccttgtaatataattattggcatgcatatctaccactcccaccagaccatgaactcctcccagcaagtattaaattctatttgcctttccttagcccctggctcataatgagtgcttaataagtatttagtaaatagggcagacggatgtgatagattgtacattttttcagatcaggtttgggaaaactggtaattctctaacaccagttgaaatcttactgttcttcaagggccagagcaaatgctagctcttccttagagattagcttaaattcacttgccccacagttaaaatttctcactcttctgggttattgaaattttgtcaaagcacttctgatgcttccttgagttgtaatgttgtgagtctgtctttcccactagctccttttgttagggtaggacccgtgttctattcatctttgcttctcccttagcattttggagattgtagatgtgtaataaatatattgttgaattgagtgcagtaagagattttccccctgatgccacagtgcttaagttgaaatgaagtctatggcttggtattttctccaggtaatacccatttttctctttcttccctctcttctttgtagatgaggaaatatctgatgaggaagggtctggagatgaagattcagagggactgggtctggaggaatatgatgaggacgacctgggtgctgctgaggaacaggagtgtggtgatcacagggagagcaagaagagcagaagccactctgcaaaaacaccgggcttcagtgtccagagtatcagtgactttgagaaatttaccaagggaatggatgaccttgggagcagtgaggaggaggaagacgaagagagtggcatggaagaaggggatgacgcggaagactcccaaggcgagagtgaggaagacagggctggagatagaaacagtgaggatgatggtgtggtgatgaccttctctagtgtcaaagtttctgaggaagtggagaaaggaagagccgtgaagaaccagataggtttgtacatggttttgctgattgcctgtttttcaaagtatctgcatttggtctacttttcatttgtttgtttttggctattctctatctcctgtgtcctttcaattagtttgtgacatgccccacttacccagaagcctaaagccctattcctgtatgcttagccagccatttctgcactgatctgcttagctggttctgctctagtacttcctgcaactggggaagattgaagagaagagtgttttctcctctccttgggttttagcattcccactctgctgtagcaaatacttgcttcatggatactgaatttattttctctaatagagaatatttgtttccatggcattaaactgctaaagctgtggtgcttagagactggtgtggtttcctgttcttccccacccctgccacctcacccccagaatattttattattgaggaatgggattctcttttcttcttttcagcactgtgggaccagctcttggaaggaaggatcaaactacaaaaagctctgttgaccaccaaccagcttcctcaaccagatgttttcccattgttcaaggacaaaggtggcccagaattttccagtgccctgaaaaatagtaagaatacttatgtcctgttggaatacttagaaccactttgtcaaatgaagacagctttgattgaagtggactgggagcttgagccatgtttattgtgctttcttctcatctgcccttgctctcccctccccatcccccttggctttccaagttgcttttttttttttttttttttgagacagagtctcgctctgttgctgagtctcaagtacagtggcgcgatcacaggttactgcagcctcgtcctcctgggctcaagcaatcctcccacctcagtgatcctcccaccttagccttccgagtagcagggaccacaagcgtgcaccaccctgcctgtagagagggatattttgtagagacagggtctcactgtgttgtccaggctggtctcaaactcctggcctcaagcaatcctcccacctttgcttcccaaagtgctaggattacagatgtgacctactgagcctggccctgagttaattctttaaagctcaggggacactggttgaaaacccactgatgtagaaagggagaaaaagaatgtctaattcagctcattaaacttggttgtatcatgtgtttaaaagatgcttcctatgtttgagaggtttttagaacaatgtgctaagatgatcttatttatatctttctttgagtgacatagagtgaggaaagatgatatgccgagggagaaacacattttagaggagaattactgagctataaagaattctagaagaggaaaaggaattgagagactatttggttcccaatgtcttcattttacacatgagagaattaagacccagaatgacttgcccaaagttgcagagcttatttgtgtatggcggagatgaggctccaacttttctaccttatgatgtaggaatcttccctctgcaccacactgcctcctgtgtgctgcttgcctgtgtgcccagtggcactgaaggactggggcagagggagatttagggtgagtgtgctgtgtttgggatctgtatatatctatatctagatattcagagtcctcatgaaagagatatctatatccatagatatagatatatatgtatagattatgtatctatctctctatatatatatttgggaggccttggcctcccaaagtgttgggattacaggcatgagcctctgcgctcagctgagatcaatatgtcttacttgcatgctgagacttcatgttttcatttgctctttaaaacttatttttttagtatcatggagttagagttggaagggacctgaggaggatatctaatttggcatctgcctgtaggtagaaccgccttaagacattcaagatcaatgtgtaggatttcccaggtagggagttcagtgaacgtttcttgtaggtgaatacctgatgtaattaggaatggcttcctagagtccagtttttgggttttgtgtcccgccacacttaaagtctgcttcttcccctgtgggaagtctgggcagtccttcccaggagccttacgtggcctgtgtgggtgaggtgggccatttatatccccgcccctgtctttgcctcctttctctctcaaatagatgacagattgatggttttcaagttttttgagatttttggagcacttctctgctatttttagtgtcctagtaccctaattcctggtatgcctttggaatgagacctagactgctctagattaaatgttttaaatgtttcacgataaggcctgttttcattttgttactcattattctttttgcttgagcctttttcattttaaaaaattcatatttaaatatagatattttaggggttagtcagtgtccagtataatggacacatattcttggatacgatttaatttctttttgttatgagacagggtcttgctctgttgcccaggctggagtgcagtagcgtgatcatagctcgttgcagcttcgaactcttgggttcaagtgatcttcccgcctcagcctcctgagtagctggtactacaggcatgagccaccatgcccgactaattttttctttttttgtggaaatagggtctcactatgttgaccaggctggtctcaaaactcctggtttcaaatgatccttccgtgtcagcctccccaaaatgctgggattacaggtgtgagccaccatactcaactcatttagtgtctttaatcactgcagtgttatttaacttttattttgttctgatctttttactcttttttgtacttaaccaattgcctttacctcattgatgaacctcaattaatctgacagcatctattaatctgacagggtgggttgtggtggaggagggagaagaaaggaagtttggtatcacatattctaaggtgggagggtagggagttttcaagtaatgagctgtgcatttgaagagtagctaatttttcttgtggcaatatgacataatatgttgtatactcccctgtcttgataaacagactttaagaaaaaaattcttggccgggtgcagtggctcacgcctgtaatgccagcactttgggaggccgaggtgggctgatcacctgaggtcagaagtttgagcccagcctggccaatgtggtgaaaccccgtctctactgaaaatacaaaaattagccaagtgtggtggcaggtgcctgtaatctcagctactcgggaggctgaggcaggagaattgcttgaacctgtgaggcggaggctgcagcgagccaagattgtgccattgcactccagcctgggcaacaagagtgaaactccgtctcaaaaaaaaaaaaaaagttcttggccgggcacggtggctcccgcttataatcccagcactttgggaggctgaggcaggcggatcactttaggtcaagagtttgagaccagcctagccaacgtggtgaaatcccatctttaataaaaataaaaatattagccaggtatggtggtacacacttgtagtcccagctacttgggaggttgaggcaggagaatcacttgaacccgggagcaaaggttgtagtgagctgagatcgtgctagtgcactctagcctgagcgacaagagcgaaactgtcccccccgaaaaaaaaaagagagagagagagaaaattcttgagcacattactctggatgaccaatttattactgtgctgtatagctggtgtggaacataggctgaatttgtaccaaccccagaacaaccactggaacttactgtctttaattaaatctcttttcaatttgcttggtcttacagagtagttaaagtcagaccggcttggtttagatttcatctcagcaatggattagccatgtgaccttgggcaagttacttaacttcacagtaaaatggggataatatggttgtgaggattaaaggacataatcaatagaaagcattagcacagtgtctggcacacatctcaccatgaatgttaggtactaatattatctttttctgctcaaagaggcatttggcagtgttcgaccatgtgagcaatcactcaatagttatcagtgtaactgagcctcactagtcttcagtgttttttacttttttattagtatttggattctttatataatttaaattaactaattgttctggaaagtgttatagtttactaatacttacaatgcagtgttggcctcttacgacgctatggaaagatggctacagatttccttattgctatacccagctactacctccttgaagcgtttaacttttccttgaaatacttttctttggcttggtgacactacctgtgctgtttgggttctcctacctttctgatctcttctctggttccttttgtatcctctcaatgtaaatttcattccgtttagaatcctgtcctcaggttgcgttttctcaatatagtctctccttggcactgtcacttactctgataaccctaactattgcctctaaaataacagacttccagctgtattctagctccagtaaactcctgagtaccatgcctttgtagcttcagcaccctaaactctacttttcagaaactaaatgaatatctccttcctctccacacaccaccccaaacacgtaaacttagtccccagtcaccttggtgttacatgttggtaatttaaacttgaactgtggaagtgatttcaaagacatcgtctgatattttagtggctgcataagtggtaagtcatggagtaatcttaacaaaattaagggattttctgtgcacaaaaccatttctctaaaagggtttgctttttctctctttcttttttttcttttttttttgagatggagtctctctctgtcacccaggctggagtgcagtggtgcgatctcaactcactgcaacttctgcctcccaggttcaagcgattctcctgtctctgcctcctgggtagctgggactacaggcgcatgccaccacacccggctaatttttgtaattttttttagtagagatggggtttcaccatgttggccaggctggtcctaaactcctgatcttgtgatccacccaccttggcctctcaaagtgctgggcttacaggtatgagccactgtgcctggccttctctcttttagaatttctactgtattaggaaatacatcttttatgttggtggcaatgatatgtaaggaagaagggaagttacttaaggaaatctcaccatgagttatttaaaacttttcattatgggatatatcaaacttatataaaagtagagaaatagcacagtgaacccccacatgccttcaccagcttaagcaataatcaattcatggtcaatcttatttcatctgtagttgtaccaactctgctcaccttctggattattttgaagcaaataatacacattctctcatcagtaaaattttcagcatgtatgttcaaaagataaggattttaaaaaattataccataatctcatgtaaaaacattaacagtaatttcttaataaacataactggcctggtgtggtggctcatgcctgtaatcctagcactttgggaggccaagacaggtggatcacctgaggtcaggagttcgaggccaacctgaccaacattatgaaaccccgtctctactgaaaatacaaaaaattagctgggtgtggtggcgggcacctgtaattccagctattcaggaggccaaacaggaaaatctcttaaactcgggaggtggaggtcgcagtgaggcgagattgcgccactgcactccagcctgggcaacgagcaaaactccgtctcaaaaaaaacaaacatacagactgggtgtggtggctcatgcctgtaatcccagcactttgggaggccaaggtgggcagatcacctgaggtccggagttcaagaccagcctggccaacataatgaaacaccgtctctacaaaagtacaaaaattagccaggcatgatggtgggttcctgtaatcccatctactcaggaggctgaggtgggagaattgcttgaacccaggaggcagaggttacagtgagcagagatcatgccattgcactccagcctgggtgacagagcgagagtctgtctcaagaaaacaaacaaaccaacaaacaaaaaacatgactgatttggatgggtgggaaaattgtaagtaaatgtcttttttgttttttttcttttctttaaggcaaaaggtcctagagagtatttctgtaacgggtactctactgtctttttcagagtttgctctatagctttaaatgaagtgattaaaggaaagctaaacttcagtcataataagttgaccttttagtgcaatgcatgttattaatgtatttaatgagatgcattacaaactgcagtgagcaccatgtttcattacaggtctaaaatgcaatatcattaaagacctttaatagaaacaatggttgtcattttgatatttcccgtaagcaaaacatccaagaacacagcataatgtaatataaatacagagaaagtattaagattttttactttcctaagagtatgaaaacagatttcactattaataaattatattttgtttgcaccctgttatcttcccatttcatacttacactctcatatctttgtggtccttgcccaaaagccccaattattttgacttgactagactaaaatttttttccccccccgagatggagtcttgctctgtcgccgaggctggagtgcagtggtgcgaccttggctcactgcaacctctgcctcccgggtttaagtgattctcctgcctcagcctccggagtagcagggagtacaggcatgcagcaccacgcccagctaatttttgtatttgtagtagagacgaggtttcaccatattggccaggccggtcttgaactcctgacctcaagatccacccgcctcggcctcccaaagtgctgggattacaggcatgagccactgcacccggctagactaaaatttttaatggtaatttgtcctcagcaataatagataccttaaataataatgttttaaattttgcgtaagctgtgggaaatcatggagtcttgataatgttttgtttttaaagttttacttatttttaagtaggcagtacattcacatagttcaaaattcaaaaatactaaagactatatatacagtgataatcctgtacccctgccgcccagtaccctgtcccacaggcaaccaattttatcactgaaatcccccccttttaaattacttagttgccttaggtgacaaatccataaatgattatttcggagttctctcagttaacactttatgggttcttggcaaagttctcacaatgttctgtagaaccttgaaatatttttaattacttgggatgggtttaagtattgcttgggataaaggcacttgcaaccccctctaattgtaacattgtgtaggcttaaggacccttattgctgcagacttcatctagccaagatgatgtgagtaagattgatctttttgcttcagctgatggctatcattttttaaaatagcttcagtgttctaattataaaagtatgtcatgcttatttcaaagatcggaaaatacatagaagcataaagaagaaaataaggattagctgtaatcctactgcccagagataaccatagttgtcattttgatgaatatccttccagaccttttcgcgtgcacacacacacacaccacacactttttaaaacagaaaatggaatcatataagtatgtactattttcaagcttatttttcctacttaatatttcatgtcagtatatttagatgtacatcagcatttttaggagttgaagtattcctttttatagatttactgcaatttagttaaccaatctgtattgatgggtgcttaggtttattctagctattcacttgtataaaacatgctttaataaacatccttgtacatacatatttgtgcagtttgtctaaaaatagcactgtccagtagaaatataatgcaagccacatgtaatttaaaattttttaataaccacattttaaaaaagaaacagttaaaattaattttagacatattgaacccaatatatcaaagatattataatttcaatatgtgatcaatataaaaatcttaatgagatattttacattccttttttcatgttaagtctttgaaatccagagtatattctataatcacagttcatctcaattgggactagacacattttgagtgcttagtagccacgtgtagctagtggatactgtatcatattgcccagatctatattccctggaaatgtagttgctgggacaaaggacttgtacattgattttttttttttttggagacagagttttcactcttgtcgcccaggctggagtgcaatggcaggatctcggctcactgcaacctctgccccgccgggtttaagcaattctcctgcctcagcctcctgagtagctgggattacaggcatccaccaccgtgcctggctaatttttgtgtttttggtagagactgggtttcactgtgttggccaggctggttttgaactcctgacctcaggtaatctgcctgtctcagcctcccaaagtgctgggattacaggcgtgagccacggtgctgggccttgtacattgtttttttaaaaaggcttttggaatatattgcctaactagcccctggaagaattgtaacaatttaaattctcatctgtaacagttgttttcctacactcctgcctccactaggtattattgatcttctttttgctaaactgtaggtgggaaatgaaggcaatcatttcttgataagtttctgtttggtatttacataatacctgttagcactgaaataacatatgcagtgttttatctatttattagagagtgagttctgtgtaggaagactttttgtcccttttgagctactactttgtccaacttagttaattaggcatttatataatgtagagagtaaagctggatcacagagcaagaacttttccaaagtcaccaagtggtggaatgaggaggggagtgtcagattcttatgcactgattctacctaccctaagagtataagccctaaatgggtcacagacctgtgtgagctaagggcagcttaaaaactactgataccaatctagctagaaaatgcatttcactgttttggggttgggtttcttaggagtgagagttgtcttcagcatcagaaacaatttttttttttttttgactgctccatagacagagcagggctatcccataggcagagtggcccagagtagctcagaaaaataatttttaatagtaatgagttagataagaaagtagccctgacttggagtagctagtagctccatagtaggatcactgtgtcactatattcatggtgaagttgtacatatcattgcacaatggaacctctttatatgtacatttaattaactcaaacgtaactatatgtgcctggccaaaagaaaaagagggagaggctgggcactgtggctcatgcctgtaatcccagtactttgggaggccgaggcaggcgaatcacctgaggtcaggtgttcgagaccagttcaacatggtgaaatcccctctctattaaaaatacaaaaaatgagccgggagtggtggcggatgcttgtaatcccagctactcgggaggctgaggcaggagaatcgcttgaacccgggaggtggagattgcagtgagccaagatcgcaccattgcactccagcctgacaagagcaaaactctgtctcaaacaaaacaaaacaaaacaaaaaccaaggagagagaaactgtttatatagtgccaataattctgcctgccactttattcagtgagcgtagggtatgcatgagatggcaggtggattcttttattgccttggttattttttgttcttgggtacctctttagtgagcatcgatcaacagaatatcaatctagtgcttaaagttacaacatgcagtctttgtacaggacggtccctaaattgaatcatctgtgtttaattgacaaagtgctgtatgggctaatgttagaggggaaagactggctgtgttgaacttattgaaagatagcacaatgccacacattatgtacaatataagggattttcaaagtggttttgtcaaaacttgattttttgctttatgcttagactttagaacccaactgctgcataagatgatactctattgtttatgtcttaaaacctgttcttaaattgtttttttaaaatcacacaggagtaagataaatatacagaagccttcaggaagacagtactcctttgactgacattcagtctcattttatttgttttacttctgtaactttagataatttctttatatctctgtcttgatttatttattctctgatatgaaaggtgagactgctgctaatggaagtaagatggggattgagaactgacttatctagcaacatggtgggcatccttgaccttgatggagtttggcaggctagtaggcttacaggcttgactggaatgggtttaagagagaatggagtggctgggcacagtggctcacgcctgtaaccctagcactttgggaggccaagatgggcagatcacttgagcccaggagttcaggaccagcctgggcaacacagtgagaccctgtctcaatttttaaaaattaattttaaaaaagaaacaaaaaaagagaatggggaaaatgaaatagtaaagtataggcaactctttgaagggttgttgctttaaaggggagcagagaaatggggcattggatggtgaaggatgtggtcaaaagaggggtgttttgcttttttttttttttttttttaaggtgaagtatcagcgtgtttgcatgttgataggagtgacccagcagagagggggaaattgatgatgcaggagagggggacatctgttgtcacagtgtcctatagtgggtgagtggggatggagtggagatgggccagtgcacaggagtgccttagatagcaatgtggaccatctcatggtggcgggtgcctgtaatcctagctactcaggaggctgaggtaggaaaatcacctgaacccagaaggtggaggttgcggtgggccaagattgcgccaccgcactccagcctgggtgaaagagcaagactgtctttaaaacaaaacaaaacaaaaaccaataaactgcatttacagtgtattaccatgtaaataaggtagactactaggacagggaagaattggaaaattgtgttttcttccctgttttttcagtcatggctcctaggccactcaaaggagaatattcctagtttagttcaagtttttagttgctctccattacctgcttaaaatcatgctattttcagttcgcttcctatttatttattttttcccttttgcccccctcccccccactgtagctcagttttatcatctcaatcctttttttcctaaactttacatcatgccatctcttgtgttaaattttccattttgagctggttgttctctaggagtagtgcacagctgtgctcttgggcctttcattgctcttctggggagagctaccgctttcgggttttcaggctctcttttgttatctcagtttactgtcagtttgctgccaaacatgcatccagagtaagttatctgagttcttgtaggtttgaaaatactgtgccctcattcctcattgatgtattcttgtttgattgggtagacctttctagattgaaaattactttccctcagaattagaaagtattgcctgttactggtttcctcttgctgctgtaacaaattaccgcaagcttggtgacttaacagcacacattgattatcgtatcgttctggaggtcacaagtcctaaaatcaaggtgtcagcagggctttgttcctggaggctctaggggagaaatctgtttgcttgccttttccagcttttataggcggccacattctttgctcatggtcctcttccatctttaaaaccagcaattccatctctccaacctctcctttcctgactctgaccctattgccttcctcttataaggacccttgagatcacattggaccacctggcttatccaggataatctcaagatccttaattatatctgcaaagtccttttgactttttaatatgttactgacaaagccacattcacatgtctggggtttaggatgtagatatctttgggggaccattattcagcctactatgtgccttattgtcttctaccatcccagtgttttccagtgacaaggtatgaatctcattcctttgtagatgacttatttttggtctctggacatgtttgggatcttctcttcattattttttcttgtatttttattttttattgagagagggccttcatctcttgcccacgctggagtgtggtggtgcaatcatggctcactgcagcctcgaactcctgggctcaagtgacccttccacttcagcctcccaagtagctgggcctcaggtgcgtgccaccacgtccagctaatttttttcttttttcttttttatagagatggggtcttgcagtgttccccaggctgtctttattcttgattttctgaaattgcctgaagagatgtctaagtatgggtcattttttatttattatgctaaacatttaccttagtaagtatgaagactggggtccttcagttttgggaaaatcttttctaatatttctttaataattttcttccttccattttctctgttctcctagattttaagcctgaattagtgttgtgtctcttatgtgttatttaacattttccatctttttgtgattttaccatgtttatgttccgaaagatttttgaagctgatttccagattttttttaaaaaaatcaattttttaagttgttatttttaagctgctgagtacatattttattttattgtaagacagggtcttgctgtgttgcccaggctggagtgtagtgatgtgatcataactcactgcaggctcagactcctgggctcaagtgatgctcctgcctcagcctcccaagtagctgggactacatgtgtgtgccactgtgcctggctaatttaaaaaaaatttctggtagagatgaggtctcactgtgttgcccaagctggtcttgagctcctgggctcaagtgatcctcccgcctcagcctcccaaaatgctgggattacaggtgtgaaccgccatgcccaccctgaagttttcattttaaatcatatttttaatctttaaggggtcttttgattcctgagtgttccttttctgtataattaataagagtataggatgtaaatttaaagttttgttgttgttgtggtaaagtcattttaattcctggaattgttcctgtctcaaccagatgttttgtttatcttggacattttcctttcttggcaggggaggggaggaggtagagatggggttgcccaccatgttgcccaggctgatctcaaactcctggcctcaagtgatcctcctgccctggcctcccaaagtgctgggattacaggcatgagccactgtgccctcattttaaaatttgtatccaatacctatatacaatttaaagagtcagataattctaggaagcttgttatgaaaaccagtagtctgctgcttgggtgtatcacttctgtgccataaccctttctcctgaagcaacaattttaagttattttgttatatctttttttgttttttgttttgaatccatgggtttctctaattaacatggtttgtttctacttgacttttcagttttaggcattacttgttgactcccctttataaaaatgaagatttagctcttattcctactacactcatgcatactttctggttatgttattaatttgtccctttgtggttatattgtagtttggttagatcagtgttcagtatttacattattatgtctgtaaacacttttcacagctgagccatgtaataaatacactatgattattttcctttcccacacattgttttgttttctagagttgattgttacatttttgtttgagttttctgtgtagtaattcaagcccaaacttttctccagttagctaaatctcttctcaagtctaaagttgcatcaaatattgtgccagttgatgttccttaagtctctcccagagcttttcgacctgctgtcatctggcctgttcaccttctcaggtgtccagctgtcatgctgggatgtgccttcaccgtcatcctgggtgttaccttagcttcttgcttctgtggatctcctattccagagtctttcttggctacttccaatttttgttgcacatcctctcatagcttgctgagaaggggtgtgtgggaggtaaatttttttagacttcagttgtcttaaaatacctttattctatcatcacaattgatggtttgtatatagaattctatagaatgttacattgtatttcagcttctaaagttgcaattggtaagtcagaagctgttctgattccagaccttgcctttttttttttttttttctttttggaaactgcagacttttctttgtccacagaattctgaaatttcataatgatgcaccgtagcgtagatctgtttttgtctgttgtctggagcacttggagggccttttcaatctagaaattcatatctttcagtcctggaaaatcctcttgaaattattttgttttttactatctcccctgtgtttcctttctctctgtcctctctctttctggaaggcctattacttggcatcagactgtttctgtgattctttttctcttcaatttttcatccctccctctctcttctaagacatttcctcagctttattttcagtactttctattgagtttttaaaattttcttctatttttttcttttttctttttctttctttccttctttcttttttttttttttttttttttttttttttgagataggctctcactttgtcacccaggcttgatcttgatctcggctcactgcagccttggcctcctgggctcaagcaatccacctgcatcagccccacaagtagctgggactacaggtgcacgccaccacgcctaactaattctttgtagtttttgtagagatgaggttttgctgtgttggccaggcttgtcttaaattcctgagcttaggtgatctacctgccttgacttctcaaagcactgggattataggcgtaagctaccgtggatggcctcttctatcatatttttattttattttattttattgtttgggtttttttcttttttcttttttcaagagaaggtcccactctgtcacctagaccggagtacagtggtgtgatcatagctcactgcagcctcagactcctgggctcaggttatcttcctgccttagcctcctgagtagctaggactacaggtgcatgccatcccatctggctattttttatttttagtagagatgaggtcttgctgtgttgcccaggctggtcttgaactcctggcttcgagtgatcaagcgatccttctgcctcagcctcccaaagcgctgacattacagatgtgaactttagcgcctggcctatgtatttttgtatgtgttcttcctgcatagtctgtttcctctaagctgctttttttgttgttgtttttttgctttcgctttaactcctgtgtaacatgttacatgtttttcttggatttttggtgatcctctgcggtctctgttgatttttaagtgtatcataccaaaaagttgattgggaactttgtatgttggatggggctttttgtctatggtttccattgtaaagcaatctatctgcaccattttggaagaactcccaatggcagtgtctttagatctttgctctttatgagatcaaaatctagaggacttccagtttcctgcctggtggccaacattctaggaggtgggtaggcttggggatctaggcattcagtctgtaaacttcagcttagtccccctgttttcaatattatgcctttgccctcaactatgatctggaatctccctgtccagagaccctctctttagctctcttcaaggataaacctctaaattttgtctaaataagaagatatgatattttaactgctccacttgtttttaggcctgctttgatctccttttctagaggtgctgggcactgccagttcctgagtcctctgcattctgtttctggactgtaagtgaggttgcatctgattcttcattgctagcaccccagtcatcttgcttaggttagctaagtcagttattatttgtccatttgctttttcaaaaactggtttgttgagatataattgacataataaattgcccatatgtccagtgtgtaatttgacatttatatacacccgggaaaccatcaccagtcaagataatgaacatattcctcatccccagaagtttcctcagcctctttataatctttccctcctggccttccctatttgtccctaggcaaccactaaatctgctgtcactatgggttagtttgcattttctagaaatctatataagtggaattatacagtttgtatcctttttagtctggcttttgctcagcataattattttgagcatcctccatattttttcttgtgtcagtagttcattgccttttgttgctgagtagtatcccattgtatggatataccacaatttgttttgtttccagtttttggctattacaaataaatctgctacaaacatttgtatagatgtttttatatggacatagactttcatttctcttgggtagctaagaatagaatggctgagtcgcatggtaaatgcatgtttaacttcggaaactgccaagctattttccaaagtggttataccattttgcagtcccaccagcagtgtatgagatttctagttgctccacttcctcagaacatttggtatgttcttaattttaaacattctaataattgtataggtaggttacagaactgagttgctatcctgtctctcattctttgcctttcttttgtgggtttactccttttaaaagttactttttaaaaaagttaccttaatcagtggaatagaatagagagttctgaaacaaattcatacaaataatgggcagttgacttttaaaggtgcaaagtcaagtcagtcaagtcagtggagaatggatagtttctttctttcttttttctttttttttttttttttaagagacagtgtcttcctcttttgtggaggctgaaatgcagtgacgatcatggctcactgcagcactgagctcctggctcatgcagtcttcccaccctaacctcctgagtagctgggactgcaggtgtatgccatcatggcctgctaaattttctttatttttcttagagatgaggtcttgttacgtttcccaggctggtctcgaactcctgccctcctgcctcggcctcccaaagtgctgagattacaggcatgagccaccattcccggcctggatagtcttttcaacaaatggtgctgggacaattgtgcactcatttgcaaaaaaaaaacttcaacctgtacctcatacttgatataaaaattaacacaagacagtcaatttatattaacttaaatataaatcataaagtgttttgaaaaacatatgggagaaaactctatgtcattgggttaggcaaagagtttttaaatacaatatcaaaaacagaatccataaaagaacaaattgataattgggccaaatcagaattaaaatcttttgctctgtgaaagatatgttaaaataatgaaaagataagctatagaccaagaggaaatgtttgcagatcacataattaacaatcagcttgtgtccagagtgtataaagaactctcaaaactcaacaataaaaaatacccattcaaaaaaaaatgggcaaaagattggacactttaccaaagacaatatatgatagcaaataagcacatgaaaagagatttaacttaatcattaatgtttagcaagatgcaaattaaaaccacaaggagatacctctacatacctattaggccaaacacaaatacacacctgacaacaccaagtgctgggaagaatgtagagcaactggagctttcatacattgctgatgggaatgcaaaatagtacagccactttggaaaaacagtctggcagtttttaaataaagctaaacatatattcatcatacgagcctgatccagtagtctctgtcttagatatctgccctagaaaaatgaagacatacattcacacaaagtcttgtacatgcacgttcatagcagcattatttataatcaccaaaaactggaaacagcccaaatgtccaaatgtgcaacaaattgtacattagtcagcaataaaaaggaataaactattgatacatgcaaaaacgtggatgaacctcaagggtattatactaagtgaaatatgccagcctcaaaagattttatacttggaaattccatttatatgacattctggaaaaggtaaaattattgggacagatcagtggctaccatggattaggaatgggagaaaggtccgagtgcaaagaggcagcccagctttcttctttgttttctatgagtttctattttcctctccactaatcttgtttccttggagtattttccacctgttttccacagtggctctctgttgaacccttcagcctggcttgattgttgtgtacgttttgcttggattgagggagggggtatatgtgtgcttattcccagataactctgggaatatttcttatggtaatggatacatgatacagtacttctagggatagaggaatgggccacatcaacctatagtgtcatttttgcttgaaatatatatccttggtactgaaaccttacccagaagagaataatagattacacagagcttctagattttgatgtgggttagaactgaaaaatgagatgtctttaaactctttttccttctctctttgataagtgatataatgtggtttggacactcagagattcctgagattccaggttctggttgatgatttactgcaaaattgcttataaattgaagtagaaaatgttttgcagacctggcagctttctggcttcacacccatttgtcacccagcatttccctttgtgtatagaacaagaattaattaggctgcactgcaggaaaagtttatggctataatttatataggatgaatttttttttaaagagacagcattgttttgttacacctatatacatgtaagtgtgtgtgtatagaaagtgtttttttccccctcttaaagcagtgtctgtaagcttctggagtaaacatttttttttttttttcctaatgcaagatgatagtgtaatagatgcatttatcatgattgctgtctgatgaaactgttggggttttttgtttgtttcttgttttttaattcattgtttactagtgagaacactcagttttaggtttacattttagacattggtcagacttgtctggtttccagagctttgtattctttctgtctcttggaagactcgggattctgtcttttttagggtcttgctcattcaattaatgttttcataatcaatgcaagtcagaacttgcaatttgttcctgatttgcacattaaagagctccattaattaagaatcttggtgtttggcatgttcccgcaggatctgtgcattatttacatggtgaaagtgcaagatgcaagtttctcagttgtaagggcaattgcagttaatcctgctttttcttttcttctttctttcttttttcctttctttttgcttgtgagtaacaattatttcacaactcattgaaactccttaaggatacattgtaccaaaataggaacaaattattcaaaagagggggctatggtgaaaaagtagaaagtaaatcctttttttaaaggattttaaaggatttatcctttttttaaaggactgtgtacaacacagtcacacaattggtgagaggcaaagccagtgtagaaactgaggtctgctgtgcctcacaaacgttgctcttggccacactgcccactcactatgcatatggtttaacttaactcttttcatctgagggttttctccccttttcaaagagagtatgaagaaacatagatatggaataaatgtcacagcttaaagcaatgaaggcaggagaaatatggagatgaatttgttatagaacagaaggcttagagcacaagaagtagacatgtccttcagtttttctaaagatgctatttcctggatactgtttcattcactaagagttagactttcagggggtcagctgatctagttccttctcctttaggcaggtaagaccattttttaggtgataaataatgtttttttctcatgataaattataaaaatacaatatgtattccttatataaaatttagaaaatagccaagcaggctggggacggtggcttacgcctataatcccagacctttgggaggccgaggcaggtggatcactagaggttaagagttcaagaccagcctggccaacgtggtgaaaccctgtctctactaaaaatacagaaattagctgggcgtggtggcatacgcctgtaatccctgcctcgggaggctgaggcagaagaatcgcttgaacctgggaggtggaggttgcagtgagccaaaatcgtgccactgcactccagcctgggcgacagagcgagagtccatctcaaaaaaaaaaaaaggaaaagacagaaaatagccaagcaaaattaaggaaatatttcttccctaatcctagcagctaagagttaagtatttttaatattttggtacatggtaaatatcttttctaggtttttcttctcagtggctatgtacttagaacaaaaatgggactctattctgtaatttgttttgcagtccatttctttctacttaacagaaattatgaatatttttccttgtcattaaatattgttctatagcattatttttaatgatagcatagagtttccattgtgtggatagtttaaccagttctttattgttggacatttggattgtttccaggttttcatttttataaatgatgtagtaaacatcattattagtaaatctttactcatatgcatacttactttgttgcataaatctctaaatgtggaattagtatattttctaagaatatgcaaaattttaaggctttttatctatatggccaagttgccttccagaaaagttgtatttgtacatgctcacctttttatatgagtgtcagttttccttatccttgtcaacatcggatacaataattttgtttcatctttgtcactttgacaagtggtatctgggaaatggtatctgttattttaatttacatttcccaatgtttaatgaagataaacatttttgctcccttacatttattggtccttgctatttcttttgtgaatcaaacagggaaaattttgaactggttctagggatagatgatcttcttgtcagtcaaccttaatgccactctaattctccttttttttgctttaatctgtttcttcttgtttggttttctggaattatatctacctcagaagacctctttgtattgttgaagtttaatcttaattgccttaaaaaataataaaagtaaaacttgtttgttgtgagatgttattttctttcagacagtactgagtctgtttcttcctgcccaacaatacttagtgaaatatgtaacgtagattgtgaaagtattatttttcccactcgtaaaagtgtcctctagagataaccattttaaataatttatctgacttccagatactttgtgtcaatataaacttttttcaaaacataaatgaaattatgctttacatcttcccatgtcaatgcctgcaggtcttttttttcgttaaaattaatgtttgttatatttgcttttttttctttttgaagcgttttaaagtaaattacaatcatgccatttgcctctaaatatttctgtttatagctctaaaaaatgaggatgtttcttagtaacattgtcatctcacctaactaaattaatattcctaatactgtatgcgtacttcatattcactttacttcgtttatcccaaaaagttttttatagtttggtttacttaagccaagttccattttatactaatccttttcaacagctgcacaaaaagttacctggctaaactaaaattaagtagtcccctataaatggacacttaagatgtttgcagtttctacctattataaacaatgctgcaaataacatttttgtacctacctctttgctttaaaagtatttcctgagggttagtttctagaagaacagtaggtcaggagctaggcatatataaaactttgatacgttttgccagattgctttctggctatgtcatgctaactaaactcatcagttgtgtacgcagagtgcccctttcggcacgtttttgccagcatcaagcattatcagaaaaatatcccactgttttaagtttttctttaaaaaattatttttattagtaaagctaagcatcttctctgatgtacatgggcttttgaattttggagactattaatccatttgttaacattcttctttcaaattcagcaagtattgctttatcttgccttactggacctgctttccatccatgtgatgtgggcttcctttagtgtctccactgttttttcaagtgtgggaatcaagtttggacatgacattttaacagaatctcacttgtgttttttatcatgtgatggtattggggagggaagttttgtcatttttttagtaattgaaaatttcattacactctgtttcccagatagttttgatacataaccctcaagggtacattgatctagaaaatgaaaactgtgcaattgttttttaagcttatagtagtgtttcaatttctgtatctgtaaaatggtgatgcaataatagtatctacctcaaaggattgttagaggacttaaatgaattagtacatataaagtgcttaggcgagtgtgtggtacttagcaggtccttactgagtattaactattaatctgaatagtgatggtacaatcttttaaggatatagctcttgggccacagtatttgttttcctcttcttgaaaggattaggtgaataaagacagtactatacatacagctagttctttgaagacttgaaatgcacatgtaaaaagtacataccaaggaagatattaggatgttattatttctttttcagttattcattcaataccatttgccaacaccaaacatacccaagtgagtagtttacagtttctgctctcaaggagctcatagtaaggtgaagctgcttttaaagcatcatttaagtgtttttacgtaaacacaacctctcaaagtgtttcattttgagttggagaataaacaaaccttagtcttactagtattaaaagaaacacaattaaaacaatcttttattttctgagtctcagtgtttcaatttaagcgatggtaattactaaattttcaggagaatgcattgtaatgtgcctagcaaaagttgttaattgtttttgtttttaaatttctgtctggcaaaatggttttgagacactctaagataatcgggagtagcccgattatcttatagttggtatattaaaataaagaaaatgttgtttgactacttgcttaacaaaaggtcagtttgttgaagatacatagttgatattaaagttaggaagtatgtagtctacattttgtttgtcagcatttagatttggaagtggtagtgtgatcatattctgccatgcgacttaggcaacatctctctaaatgaagaaaacatttgtagcataccttttatggcccaggtgatgtgttggatgctggatgacaggctgaagctgccctgaagcagctttaaggtggtgaaatcagacacagcacaaaatggttaagtgttgtaacgatatgaagaatcctgagagaggagtgattaattctgcatggaatccctgttttagaaaggtattttctgaatctccattttcatcagttttttccagacccatactatagagagaatttgggcatttgcttagagacagtttcaccacagcagaggctgtttttttttttaaagacgttataatatgaaagagtgagacttcttaaaaatcagaggggttacttggattgtggttctaattttatttttaataagtttcctttcttcacagtttattttaaattttaataaaattttaaattgtaaaagtaatatatgcttataaaatattcaaacagttcaaaagtatatcaaataaaaatgaaagtatccgcactctccctgagtaactactgtaagacagtttaaacaattacagtacttgtaaataaacttggtttttaagtatctcatattctgaacatttactcttttctgtttaaagggggagagtaaattttcctttttggcaaagtgctcagtagcgatgcaggttgtctaggaactgtgaagtggaaggtaactgtagtagatttcaggaagtacattgatcagctagattgctgtgtcctatagggctttttaaggatttattgacatacttcatcaaggtatttgagagagtattcagggaaacctaagaaattctgcagttcttttcccttccttataaattcatgcctggtcagaaattacagcttgagtgggatgtccctccacagaactcaaatgcacactatctatcatgttacttagtgtggcagtaatgtaaaatggtaagaatttttttttctttttgtttctttctatgaggagactcacccaacatatattttatcatatgtctcttcagcattcccttatttcaacttgtacttactcccccaattccccacatcattctcttaaaagaaaaaaataagttttgtccactgaatcctctttcttatttgatttaatatatcttgagttgaacgtttctcacaaaaacactttgcattcagaattagcctatcaagttgtttcctccatacactcctgcatagatcgcacgccttctactgtggtgccctctgagatatgaaaacccacgtctgcttttggcttagccttcatgattttagaatataagtctctacattctgctttgaaaagttctccttgtggttattttgtaccataaaaaaaaaattctacttttagtccgcagagctcaccaacaaactgggacagaagtcctcacactattccagttaaaaccatggtcctcataatagcacacacatttatctaaatctgaatatatatacacatatacctgtatatgtgtatatacacttggatatctagaaattctagttggccatatgttggaaatgatagcaacttatccaaatggttgatgttgaggaatttgtaacctgcagtcctctgtcttactggtaacgccattctgcttggggaatatagaacaagcccaaacagtaatactgacagaattcggaattatgatacagtggagccttcacgcaattctttgttgaagaagttagggcctaaatgttaaggcttattgttattctgagttgataatctctgccttgctttaataatttttcctcatgcctgggtagcccgcgagttgcacaataatcactcacacagctttgtaatcaatgcccaaagtaataggattcctctggccaccggcaattaataaatttgtgtcttttttaaaacactagcaagtcgggcctgaaatacgactgactggctctcctcatttgcatatttattgcagtggaaaaattcttaccagatgattgatgctgagcctgcctcttgaattccaagcagcacattattatgaaatgaaaaatgccggccatacagttgattaaagttgaagacagtggaatcggtgttttttaagattgtgggagaattaaaggcatattttaatagatgttgacaagaagtgaactaacaaaagcaaagcaaaggatttgcttgaaaagatttaatcaaacgtctttcttgggggattaattgctggggatgactagtgcaagtggcaggcttgtgtggatttgaatgaaaagtattgttctcaggccaatatatcgtgtgtcattttgacctatagtttagctctagttctagagttacttttgaaggagaaaaaaatgctcttgtaatctgtaaattccaattcaatgtatttatctggggtaatatgaatgggggagtttatgtgtacttgtacataaataattgtaatgtttgcgtatttatttaaaaacaactgtatagatatttaaaaactgataagctttatttactttatacactcactcttcctgttctcgcttcacgccattgccagaaattgtacttactggtttataatctaattaatgaactgtgtgtccatgcccaaacttattcctcgcttacagttttgtttatgttggacagcctagatgaatcagggaaaaaaataaagctgttaggtgaaaatggtttttagattggtgacattttatatatagaatgcttgcatatgggtagcatataaatgaatacctaatataggagtctgtgaatactgtccaatcctagtacaagcagagcttaagatttttaccatgtgaaatatgatttttgatagtaatatgccttctatttttacagcattaaaaaaattctaaaatgccttaatatataataacacagttactatttttaccttattttgtaaggacaagcaaaggcttgtccacattttataaacgagaaaattgagactcaaagagattaaattggtccattcagcataacatgactagttagtgacagtgtcagttgaaatacagggcccctaacccccagtaaagtactgtttacatttatcctctactgaaaattattcctaaagctggtggccagatgctaaggttgaatcttggtaatatgatgaggcatatgtccttcttaatctcctcttaagggaaagacctttggaaatggaccatgtagggtaaaataaacatatatattcttgacagtatccgtttgttttgtggccatgtgccaagagggagagggaagaaagtatatgaatctttgctgcttttcttaacttttaactcttgtaataattgggagaaaaattagaggtgaattagaaactgttgattcattctatttattattcacagggttgaacagctagaattcagtcctgtatgaataatagagagtggtttttttttaaatgtgtttatttgtttgttttggctgggaagaattcactgttggatttgagtttccgggagagagtctttccctcactcttgtcagctctggcttggaggaggcttaccatttgcagcaaaggattgtcccattgtctcagattttacatgccatctagaaggaaatgcagccctaatattgcaaagaaataagaattgtgttctaaatctctttataggaagttgtccatgtattgggccactggtgacatttactttgataaacttttttttttttttttttggtggttagaagtacagatttgcagatttcatctctggtaggtctcttgacactttgatgcatggtagtgctatccctgaatggagcctaaatactccagggccactttctgactgggtgaaggggtgtataaaatgagaacatatgagagagtattaacagaaaggcacactttgatttactgatattggctctctgctttcttgttggattgatatgctgcctaatatatctgcaatggattttttaaaaactgacttgaacaacataaaaaggctcgcatagctacttgaaaatggcccttaaaagttgtagtcttttgttggatattttcacaattcttgggtatgcgatatgttagagtcaaattctgacatgcatgttgaggacaagtagctataaataatatagactgctttgcagcttattctctgggtggttgttgattttattttttagatcgtggacacatggtacttacaggaattaagggtcagacactttgctcttcttgttcttttaacttttctttcttttttttttttgagacagggtcttgcttcgttacccggacttgagtgcagtgggatgatcatgggtcactgcagcctcgaactcctgggctcaagtgatcctcccacctcagcctcccaagtatcagggactataggcgtgtgccaccacgcctggctgatttcttcttcttctttcttctttcttttttcttcttcttcttctttcttcctctttcttctttcttctttcttcttcttcttctttcttttctttttttttttttttttgacagtcagtgtctcactgtgttatataggcaggtctcaaactcctgggctcaaatgatcctctcctttggcctcccaaagtgttgggtttacaggcatgagccacggtaactagcctaaatttttcattgtggtacacaacatataacaaaatttactatcctaaccatttttaagtgtacagtttagtagtgttaaatatattcacattgttgtacaaccaatctccagaactttttcatcttgcaaaactgaaactcaacccattaaacaacagctccccatttccctctttctccaacccctggtagccaccattctgcttttctctctgtgattttgactactgtaggtacttcatatattggaaatagtatttgtcttttttctaactggcttattttacttagcatgatgtccccaaggtttatccatgttgcagcatgtcagaattttcttcctttttaagtctgactaatactccattgctttttcctgtttgttttttgttttgttttttttttttttttgagtaggctcagtttgaagcattatagatgactcttttctatacaacgatgaactgtgatggtgggattatttattatactctggttttgggatttttttatttttatttttatttttccttgagatggacccttgctctgttgcccaggctggagtacagtggtacaatcttggctcactgcaacctccccgtcccgggttcaggaaatccttccacctcagctgcccgagcagctgggactacaggcacgtgccaccacgcccagctaattttttgtatttttagtagagatggggtttcatggtgttagccatgatggtctccatctcctgacctcgtgaccacccgtctcagcctcccaaagtactgggattacaggcgtgagccaccgcgcccagcccagtgtttttttgttgttttttttgtttgtttgttttaatggtggtaaaatatacatgacataaagcttatcattttaagtggacagttcattgtcattaaggacattcacattgttgtgcaaccgtcaccaccatccacctccagaaccttttcatgatcccaaactgaaactctgtatcattaaacagtaattctccatttccctcttctcagcccctggtaactactattggactttctgtctctatgaatttaatgattttaggtacctcatgtaactggaattatacaatatttttccttttgcaactggcttatttcacttagcctaattattttaaagtcccttctgggaaaattttttttagtgtttctttttttttaatttttaaaaattttattgttagagacagcatgttgttctatcacccaagctggagtacagtggcgtgatcacagctcactgcagcctcaaccacctaggcttaagggatcctcccacctcagcctcccaagtagctaggactactggtgtacgctgccatacctggctaatttttgtatttttttgtagagacagggtcttcctacattgtccgggctggtcttgaactcctggtctcaagcagtttatccacctcagcctcccagagtgctgtgattacaggtgtgagccaccacatcaggccttagtttttttgtttttgtttttgagatggagtctcactctgtcgcccagactggagtgcagtggtgcagtcttggctcactgcaacctccacctcacgggtccaagtgattctcctgcctcagcctcccgagtagctgagactacaggcatgcgccaccatacccggctgattttttttgtatttttagtagagacagggtttcaccatgttggccaggcaggtcttgaactcctgacctcaagtgatttgccgacctcgtcctcccaaagtgctgggattacaggtgtgagccactgtgcccagactgatttttttcttaagacagagagcaactggttaagaatcttggtttggaacaaaggcattttgagtttttttggtgatagttatgtattacaaattctcccaagtggtatgatatgcagattataaaggattacagaatttagaaatgatgtaatcaaagaccttattttaaacaaggaagttgtatttatatagtttgatatgcagattatttgaaggaatgcaaagtagttattggaccattgagttctttctgactagtctgagatggctctctcaggtaggttggctctcaggcctgacattgaaatagaatgctatagtatgaaatatatggagaacttgtctaactcatgtattggtgtcctactgatggaaaaagttgggatataaactagtgagaagtctgctcatgctggacagggtagaagcagaagcagaaaagaaagaataagacataaaaatcatttaacctaagtttgtgtgggctacagtttgtgtgaaatgtaaatatatgaatgtcgggattgttgaacggaagtagggatgcttgtgagactacagttactaagtgaaaaatggaaggagtgatagaagcatggccagagataaatgggcaattattagtgacagtaagaatggaaaacacagaattcagcaaccagttaaacatctagaataagagcacccaaatgtgagtgatctatgaaaacacattgaacaatgcagagaggttcagacagggagaggtattaagcaggaagaaaaaagttctgtttctgacacagtatgtgtgaaggagtgatggaacaaccacatgaagattttctggcagtcactggaaatgtgagagtttgattataggagaggtgtctgagtactttcaacacataaatggtgactctcagtgtctagttagccccttgagtagggttattctaatagagaaggtaagaattctgttgtcagaggaccagttttgttttttgcggggagattttggagacagcgtctcgctctgttgcccaggctggagtgtagtggcataattgtagttcactgtaacttcaaactcctgggctccagcaatcctcccatctcagcctcccaagtagttgggactatagtgcgcaccatcaaaaccggctagtttttaaaaaaaattttgtagagctggggtcttactgtgttcagcaggctggactcaaactcctgtgcccaagcaatcatcccgtcctggcctcccacagttttttttttttttttttgagacagagtctcactctgtcgcccgggctggagtaaagtggcacagtctcagctcactgcaacctctgcctcccaggttcaagcaattctcctgcctcagcctcctgagtagctgggattacaggtgcacaccaccgtgcgcggctaatttttatacttttagtacagacggggtttcgccatgttggccaggctggtctcgatctcctgaccttagatgatccacccgcctccgcctcccaaagtgctgggattacaggcatgagccactgcacctggcctccaaagttctgagattataggcataagcactgcccctggctgaggatgaggtttgttcagtgtgtgtggttttttttggagacagggtctcaccttcactctattgctcaggctggagtgccgtggagtgatcactgctcaccgcagcctcagcctcctgggctcaagccatcctcccacctcagggcccctccaccaagtagctggaactacaggtacgcaccaccatgcctggctaaatttttttttttttttttttggttagagccggggtctcactgtgttgctgaggctggtcttgaaactcctggactcaagcagtcctccccgaggaccagttttttttgttttgttttttccagacagaatcttgctctgtcgtccaggccagagtgcagtggcatgatcttgactcactgcaacctccgcctcctgggtttaagcaattctccagcctcagcctcccaagtagctgggattacagccacccaccaccaccctcagctaatttttttgtattttttttttagtagagatggggtttcaccatgttggctaggctggtctcaaactcctgaccttgtgatccacccgtctcggcctcccaaagtgttgggattacaggcgtgagccacagcgcccggccgaccagtttttattctgaaagtttttatccgtagactatatacatcatcttgaccagctctattacatatgcatcttattggctccaaggagaaccaggtgagaatatattctcaatgcccaaatttttaatatacaattcaatactgcaaatagaaagtgattcattagcttgggttttcgtatgtgaacaggaacttttccataaggatatgtgttgagagatggagtgaaggatgtggcagctcaaaccagaggcacatgagatctcctgggggcaaggtggaaggtgttggtggtggggatgcctagacaaagtcctactctttaggagaagagaaggaagtgctcaaggagctgactgataaggaatagtccaggaggtcagcaggtaacctgtaggaagatacctaagaaacttaacaccaacggaacaaattaatggttataatgagaggccggggaggagtttgtcaagcttaatacatttaagagctgacaatgtattggactcttactctttgcagacacttttctaagcaccttacatgcatgatcttgcttgttcctcacaacaatcctgtgaggtaggcaacgttgttatttccatttgggaatatttcagagagtatttagttcctgtgtgtatcctgtgcctccccttcactccccacagccagaactgctcaggagtcatgagttataggcatcacctactttggagaattgtagataattaattgtcctttctctgtcctttatttcccaggtcacaaggcacttaaagcattgttgaggtcattggtaggtcttcaggaagagttgcttttccagtacccagacactagatatctagtagatgggacaaagcccaatgcgggaaggtaagagaacagaatcatggagttgcttattttcttttcatttggatagtttcccatcatttatgaaagaaaagctaagttctcttcaggcagatattaatgttagtaaaatagagtctcatatttacctgatggtcaggatggcacataagttggtgattagattttagatttttatatttagttgtacctgatgtgctttgcggtcttagacaaaggcttgccttctctttagatctattggaattagaagataaaagcactttgttttttagagatggggtcttacactgtcatccaggctggagtgcagtgatgtgatcgcagctcactgcagcctcaaactcctgggcttaagcggtcctcctgcttcagcctcccaaatagctgggactgcaggcacttgccaccatgcctggctattttttttttttttttttgtagagacagggtcttgctgtgtttccctatctggtctcaaactcctgggctcgagccatccttccacctcagcctcccaaagtgctggaattataagcatgggccacttcacctggccaaaagcacatttttaaaatattaatgcttaattaatgtttatgaaacattctgtgcccataccatatattggaatcactggtcacagccatctcctttgaataaaagctgttattatgaaagatggaaaaatttcagaaaacagcaaaataattattttttccccctgaaattattacatttgatgaagatttttcccccttttgtttacacctgctgtatatacctgcttgctttttttccctcgagcttatcttttgtttcactttttatctactgaactagttgggaggacaaaaaggaaactcacatttattgagcacctattatatgttgaggtcagtaatccagtgagtgcaactggcagatagttggaggttgtattacattgccatggcagttgcatagatggcactgcaggttagttagtgctaattgttgcctaccgctttgagttttcttcacattcagcttctcttgtatttggttcaactaatattattcatctttccttaacagttggttacagagagacacatttcccttattgatttgaggattaaggtcgtagaaatatggttatgtgtttaatttttaaatactgtcctataatactgcaggcctggttcatacacatttctaataattcttttaaaacctcatttatttttatggtttacttaccttttaaaaaatattttgaaactagttctttttatatttgttttaaaagttacatgaggctgggtgtggtggctcatgccctgtaatcccagcactttgggaggccgaggcaggtggatcactggaggccaggagtttgaaaccagcttggccaacatagtgaaacaccatctttactaaaaatatgaaaaaaattagtcgggcatggttgcacacacctgtaatcccagctacccatgaggctgaggcatgagaattgcttgaacccagaagtggaggttgcagtgagccaagatcgcgccactgcactccagcctgggcaacagagcaagactgtctcaaaaaaaaaagttacacgagtttttgattgatctcatgaatattcttctcaaagagcaaaagccatccttatatctttggtgttattttgaatggagacagaacaggtaaggcctaaatattctcagtcctttatgtgagcctagtttttaaaatctaagtaatgtttgtttacactggacataatattcttactgcttttctagtgaggagatttctagtgaagatgatgagctggtagaagagaagaagcagcaacgaagaagggtccctgcaaagaggaagctggagatggaggactatcccagcttcatggcaaagcgctttgccgactttacagtctacaggaaccgcacacttcagaaatggcacgataagaccaaactggcttctggaaaactggggaaggcaagtgtgtgtatgcgcgcatgtatgtgtaagataggttgtggcaacttgaagaagttttaagaaattggaactacagctcatttatatggatgttgtcacgatgtaatggtaatcattcatttctatagcaaaatctactgaacttctggcactggggtttatacgattcagacttgggattttaactttattagaaagaatgttttattcttaaaattgaggccttgtaagtgttcaagtgctgaaaatccaaatactttaaaggagtggatttcaaagcaataattattaaagtatcagaagctaatctccgtgtgtagaaaaatgatatgacctgcttaagactaactttttttttttaagaacaattatagccactcacaaactcagtcctttacagaaagtccctcctgaaaagatgattttctatctctctgctgacacagaaagatagagaaaccaatgtagcttgccttcagcactgattttctgcattatctgacactgcttaatgttgttgcagggttttggtgcctttgaacgctcaatcttgactcagatcgaccatattctgatggacaaagagagattacttcgaaggacacagaccaagcgctctgtctatcgagttcttggcaaacctgagccagcagctcagcctgtcccagagagtttgccaggggaaccggtaagaactctgtaatgcagagtgattatggggaatagtttctatgaggcttattagctgaaaaacttgtagctattacctgtttatataagaggttagtgagagaaaggaaagcaacactactttactggattactgagagaaacttgagtgtatgtgagaggagagagtttttaaaaatggggcttctattaactcctgtgtgtcatcttctcttaattttgagtttgatgcaggagtctggtagtagaagcattcataatccaattttcaaaattcagttttaaagctacttctgtagaaatgtcagtattgaaacaagtgtgtactttaggctcaacgtttgccatttaggtactttagaaagggtgcagaagtggaatagtcaaattcttttgtttaaaggaaacatttaaaattttttaattatggaagaaatatatacttaatccttttttagtttatagcaacttaaaatgaaaagcaaaattctctactctgaaaatttcactcctgaggtgaaatttttttattttttttgtcaattgcctgttaacgtaactcctgaggtgaaattttcagtatttaatagttgtaacaagtttacagttaataattaatagttgtaacaagtttttgggtcttttctatttgtgtaactatatatgtgtgcaaataacaaatatatatgtataaatatggttgccttttttactaaatgagagacatttatgtagtataaatatgtaaaatattacaactgtatttaaagtcttgcaacttttaaaatctaataagtcctagatactctttccatttcattacctagagagctacctcatttttcctaatgacctcaaagtattccattgtatggatatgcactatcatttatgcaaacaatggatattatgttgtctccagtttcagaaacactgctacaggaaagattcctgtacatgtattatgtgttcgtataaatatatgggtagatttcttgaagtggaagtgttaaagaaaatacaccaaattctgatagatgttgccaaattgcctccaaaaaggctgcattaatttcagtcgtagaggtgaaaaatggtatcttctaattctaatttacacatatttaatttgaatgagggtaaacatattttcatatgattatttatgggtttttttggtcaactgcctgttaatgtttttgcctgttttcatattggactgttttgttttttaattttaagaactttttatatcttaaggaaaacagtgctttgactgttctacatattatttatagtagctacattagttagatagccttgttgggattcactcttttcttactcattgttaacataggagatccttcctcaagcccctgctaatgctcatctgaaggacttggatgaagaaatctttgatgatgatgacttttaccaccaggtgagacttttacactctcttgttacaaatcatgttttagcattttaaagcagcttatagaattctctgaacaaagaagttgcttattttggaaggatagagtcagacagtgagttagaactcccgcgttcaaaattgacttacagtgtcattgtggatttgttgcttttcttctattttatgttttccttttgaaatgaaaacagctatagctactttgttgttgcttgagtgtaaattagctgtaaaacagtttcaggtttttttctctgagtcaagtgggttctttctgagccatttttgatgatggaggatttgttaagttatttggtttcttgtctcattactattagaatgggccgtggagctggagggctgggatcccagagttcctgaattgcgctactgatcctattatctgttaaatcttgttcttaatgtctttttgtgcctgtcgaagtcagttaagtatgtattgagaatgtctgcaactgttgattataataagagcatagtgcttttgaagacagagagaattggtagaagttgaaatatagtccagttctcaatatgttttcagactcccccacttctttccctgacattactctctgctggcatgctgttctttttaatgatgccagagactgttaagatagactaaacatttgggctgttctagagaactgaaataacttcctgtattcctgagtctcttgataagttatacttttttttttttttttgagatggagtctcgctctgtcacccaggctggagtgcagtggcgcaatctcggctcactgcaagctctgccttctgggttcacgccattctcctgcctcagcctcccgagtagctgggactacaggcgcccgccaccaggcctggctaattttttgtatttttagtagagacggggtttcaccgtgttagccaggagggtctcaatttcctgacctcgtgatctccctgcctcagcctcccaaagtgctgggattacaggcttgagccactgcacccggccagacaaattatacttcttaatagagtgtgtgtttggctgtaccctttctagcttagtggagaatagaggaagctgttcagcagtgatataccagttattgttgagccattgtttatcaagataatttttttctctgtcaaatttttaatgtgctagctttagccaagtaatttgcgactgcttgttgagggtttagccatgactgctgtactgtgtatatggatatgaagaagaacttcttaggaaaattacatgtaaagtcaatatagaacaagtgattttatattggggatacctctggtcttgccctaaaaagagaaagagactttctattaattttttttattcattctataatgtttgataaaattattgccataagtaagtcttaaaagtaatgactagagggtataggaaaaaaagattggtgtggctgcagctgttccctgtcagaggtcctgattcttttttcctcttctcttattatattcatttgtcagaagagtaaggaactctattttgttctagagtgtctaaggaagtacctgatatgggatattaatgctgtataattgtgtgagatcacgggagacaatcaaaaatgttccagtcctcattaattgaagtgtacattgttcgatgaaaagtgcatcataaattaaataggcttaataaaataaagtgaaattactggggagaagttgcctctgttggcaatccttagtctgaattttttttttttttttttgcctggaggtctgtttaaaaagaaatagcattacttgattggcccttcatcccaattaataattttaacttcgataaattctgatttcagagttatgactagtcacatcttagcttttccccttgctggttaattggggtgctggggttaatctaaattaaaacttaaactaatagaggtcagcaaggcagctaaaacacctgagtgaaacaaatggggctgccaggcacaactttatcttggctgtttcccaagagggaagtggcagcaaattggagttgtttcagccttctgtaaaggtgaatgatgggtgacacttgttaatgtacagcatctccggaagcattccagattgctttgctgctacaccaactgctgccatccatgcacagtcagtaggaactggaccagttgccaacatctggcagcacagcaaggaatgggtgcaagtcttgaaaccctgcagattctaaatatggtgcttagaactgtgcaggttttaatcacttaccactctttggcagcgggctacgacagcttatcctagcctcgtacatcacattccgacatctgctgagctgcaaggcagctgcacattcattttcttttcttgccttttctctttgcttcccattccccttcttcttcccactcccctcacccttcagttttcctccccctcccaaatatgcttcttgggagagatgatctgtaaagattactgcttcattgtgtgcaagtaattgtggtgatgccaggcccttgacagacacaaggtagcacctgttctgctgacctggttaatttcttctgttgagtgggatttgccagagattggagctgaagccaattcagtgataaggctaaagaaaatggctgtatgttttctgtcacttcccaattaaattggcttcataaagtgctttcctttatttgtcagagtagtaagcctgagctaagtgttgcattcagaagtggttcaatatattacaatgggcctgtgagttttcatttgtgtggttttttttaacatggtcatatggaagagctgggtggtgaatataatacattcccccttttttaaaaccatacttgaagccagactctttgggttcatgttttgtaaggaagagattatagccacattgaattttaatgttccattgtaagggtttaaaggcttacttggttaattcaggtgtcttgaagctgtgtgaatgccctaactactgagaatgatgtgtgggctcagaacactccccctctacacacacatactcattcacactttcattctttgtttcttaatgggctttaagttaccatatctttcaaaatatacttgtattatttaataaaggtacatgtatatatgtatgtatatgtgtgtgtacatacatacatatgtatgtgtgtgggccatagaagatagtatctgatatcataaataatcttatcatttttagagctgaaaagaaccttagaagaaactgacaccctgagaagttaagtaaccgtctgacatcatatagtaaatggcaacactggtagttaatgtcaggacttcttagaccaagtcttgctctgtccatacctttatttcttaaatatttcattcttgagccataaagagatttcactgtagtattacagttttcactttgtaaataaataagctttattttcatagaaccagaaaaagtattttgtgttagaaagtaatttttttccttagaaggcaaatgatttattgagcttttgttacttaaacaattctaatgaaaaaattagctttatagttttgttaccggtttgtttggaaactggaattgctgaaagcatgaagtatagccaatggtgaaggttttatgagagaaactgttcatctgcttcagaaaagcattgcaggattttacttccaaacagaattactttacagttggcctatttcttgtcaaagcgcattcctaaaggcagtttcacaaaacatgaaggttgtaaatgaccacgaaggatgagccattcagaaatattttcagtgtctgtttgttatgtcatgatcctatctgctacttcataacattcagttctcttcagatctgttgtctgtatcaccatttaaggcttttgttttgttttatttttttaaaccatcagatgatctttgacttgataagcctaagtttttaaagaatcagggaaggaccaggatttgctaaacactagtggcgtgccagtccctggactaagtagataggtacttggcatgtgtcttgatttaatcctcacaagatcctcgtattgtgatgtaactgcacttagcaataagctatataaagtggctggttttcttcttttcatatcccagatcgcaaactagtttcttgtcacttcatgcgatattttgttctgaaaggactaattgagcttagatgttgacagatcaatacctggatttctaagagttcattagggttttgtatgttgcttctagctctgtttagttttgatctggtttgtcctgtcactttgactctagccaagagtatctagagaacggcataataggttttgctcttttgatgaccactttgacgggttaaatttcttctttcatttgccatcaggacatgtctataactgaccttgccacatgctgaatttttgtgtctaagacatttgataatgccataaacaggtaattactaattcagtgaactattaaaagtcgataatgttgagaaatagagaagaggcaggctttttgacatgacagtttaattaaattggtgagcgattaatatggacaggtgatgtggtagaattgtatgcatttagatcttagtgtgaataagaggtgtcccaagctacccttatgttaatggtgatatgatattttttatatatttgttgtttttatttatcgatttattttgtttgtttgtttgtttttgagacaggatctcactctgttgcccaggctggagtgcagtggtgcgatctcagctcactgtgacctcgacctcctgggctcaagcaatcctcccacctcagcctcccaagtagctgggactatagacaggtaccatcacacccagctaattttcatattttttgtagagacggggttttgctgtgttgcccaggctggtcttgaactcctgggctcaagcagtttgcccaccttagcctcccaaagtgctaagattacaggtgtgagccacggcacccagcctggcaggatgatattcttactattggcatatatctttccagtggttcaactgatggttaataacatgtttttaagtctgatttgaacctgcctctgtgaatgagttgttggactcatgtcttctgttcagggcagtattttgtttttagttttactttaaaatgttgctgttatttgagatctggatagtgtttcttaaaagtttgatgaaacttattacgcatagatatttacggttattttagagagaacatatgtatgaagtacataaattttaaaattggccaggcatggtggctcacacctgtaatctcagcactttgggaggccaaagtgggtgaatgacttgagcccaggagtttgagactagcctgggcaacatggcgaaactccgtctctacaaaaaatgcaaaaaaaatgagtcagatgtgatggcacttgcctgtaatctcagctacttggagactgaggtgggaaaatcatctgagaccaggaggtcgaagctacggtgagccaagatcgcatcactacactccagcctgggcgacagagaataaataaacaaatgaaataaaaattaaaaattgaaattatgattgaagatatagcatggaattaggtttcttggggcatagtaatggtattaaaaacaactcaaagcaaataccagggcccaattaaatttcagttttaataactgcaagattattttgtataccatgtgtaagaatgttattggaactgcatggtagtttctgcttctttaagacattttccaccaaaagtgctgccattgtatatctgtcaatgtttagacccaggtatgtcatcaatattagcatttggttgctagcttgggctcactgttgtggaagctgcacagaacaggaagcaaaagccacatttttaaatgcgaagtctagaaatttcatcaaacaggagcgtcaaggtaaggtgcacatgactggccctcatttctttcaggtttcttgctttaaaaaacatcagagcatgacttgagtactactacttcgtttaaacaaaggtaaaacctcagaacgaagcctaaaacagtacattttacagggccagctgggaaagagataagaattggcttagaagtgttgaagaaactttttcaaacacaaatggtacctggagagtttgctaggcaaatatgtggccaaaattaccctttttgtactaatatgcccagtgtcagccaactgagtgtaaattaaacacaggatcccagcagtattttagtagcctcaagtatagagtttggcactcctcaagaaatggagacattacctcttcactaaagtaggcatgaggtcttggtattaatgtgttgctcctttaaaagtaacatatcggaaaaatgatttagcaaagaaaggggaagtttataggcatcttcaaatatgtatatgtattgtgagaaaatcttcacactctatacatctgacaaaggactgatatccagcatctactgcaaactcaaatcagtaagaaaaaaacaatcccatcaaaaagtgggctaaggacatgaatagaaaattctccaaagaagatatacaaatggccaacaaacatgaaaacatactcagcatcgctaatgatcagggaaatgcaaatcgaaagcacaatgcgataccaccttactcctgcaagaatggccataataaaaaaatcaaaaaacagtagatgctggtgtggatgtagtgaacagggaacacttccatactgctgatgggaatgttaactagtacagccactgtggaaaacagtgtggagattccttaaagaactaaaaatagaactaccatttgatccagcaatctcactactgggtatctacccagaggaaaagaagtcattatttgaaaaagatacttgcagatacatgtttatagcagaacaattcacaattgcaaaatcatggagccaacccaaatgcccatcaatcaacgagtggataaagaaactgtggtatatctatatgatggaatactacagaaccataaaaaggaatgaattaacagcatttgcagtgacctggatgagattggagactattactctaagtgaagtaactcaggaatggaaaacaaacatcatatgttcccatgggtatgtgggagctaagctatgaggacacaaaggcataagaatgatacaatggactttggggactcgtgggggaagagtggaagaggggcaagggatacaagactacaaatatggtgcagtatctactgcttgggtggtgggtgcaccaaaatctcacaaatcaccactaaagaacttagccatgtaaccaaataccacctgtaacccagtaacttatggaaaaaaaaaatgtatatgtattgttgatctagataaaaacataatcattttaaagttggatagcgtctttggagaccatcaagtccaaactctcttttcacaagtgcagaaaatggagcctgaaggaagtacatgactgttgtaagatttacccacttagtgaaataggacattgaaacctgtgttcttgctcccagtttgattttctttctgacacattatactcccttctgattggacaagtttgaaaatcctttgagaattttattttcaaatctatatctgtttaggacattggagatctactgtatcttttagcactctgatgattcacaagtatcatttttatacagttataaactttattcagttaacatttattagtctgggcacagtggctcacatctatggtcccagctctttgggaggccaaggcaggaggattgcctgagtccaggagttcaaggccagcctggacaatatagtgagaccctgtctctaagaacaacaacaaaaacatttattatgccagatgctagttttataaaggctagtaagaccaaaatccctgcccaaagaatttgtgttacctaagaagagtgaatatctatgcagtcacaaaattaagagtgtgactttaataaaattaaggtggagaaaataaatgttgaaaagagcaatcaggtatttgatacaaaaatgtacatgtggttctctagggttctcacaaacatgcctcaagcattcattagcctactggtttacccctcaacatacacctgatctaattctacagtaatttctctataacttgtaaaaggccttacgaggcactatttgacataaacattggataatacaaattccatattttccaagaatgtaatcattgttggaagccgtatggagttgctggtatccactgttacttatttcagggtagaagaatcttcagattggtgataggtagaagagggttcattttgctattgtctacttttgtggatgtttgaaaatttctgtaataaaaagttaaagaggaaaaaagtcatatttcttttttccttcattcattcaacaaatatttgagtatctactgtgtatttattgagtaactactgtcctaggctgtgctgtctaatgtagtaactgcatgtggctgtttagatttaaattttgattaatttaaatagtataaaataaatggttcagctcctcagtcacactagttatatttcaagtgctaagtaaccacatgtgctagttgctattgtattggatagtgcaaatgtagaacatttccattaccacagaaagttctcttggagctctgttagaggctggaagaaaacaaagttcctgccctcatgagcgttcattctagcttagaggtaggatgaaacagggaactacattgtgacaaatgcagtagagaatgatgaaactggttatggtgaaagcaagccctaggatagggaagtgatggttactgttttaatttaggatgtttaggagataaagatatttgagaagagacctgaggaaatgacaaacagagccatgcagttgtctgggggaagagcattagggacaaaggggatggcaagtgcacagactctgaggcaaaagggaggctagcgtgttccaggaaaatcagggaggccagagtcatgggggtcggtgggggagtaggcaagaaagaggatggtaggagaggaagtcaagaggtaatgggaggccaggtcctgtgggaccttgtaggccactgtagcactttgatgtggctgagatgggaaactaccagaggattttgaatatagaggagtaatatgattggactcatattttaaaaggatcactgatggctgtgttaagagtagacatgagagaatggggggcaaggtggcagacaggggaccagttaaaagactctagtgataatccaggcaagcgatggcagtggcttaaactagggtggttttggaagagagaactggttggattctggatttatgttgaaggttgagctgacacaggatttgctgatgggttgtatgtggtatatcaaaagagagtagtcaagaatgaccattaagattttggcctgagcagttggagggattaagttgctatttacggagttgggaaaaaacagtgagagaagctagtttggaagataaatcaggagctcggttttggttatattgccccctcctcccaacccctgtggacctatgttggctttatttttgttactaggacctatgttggctttattttggttacagattagttatattgtttatgatacttctgccacattcatgtggagttgttgaagagttatatatatatttttggagttcatgggaaggtccaggctgaaggtataaatttgtgagccttcagcatataggttgtatttaataccatgagattgaatgagattacctagaaaatgaaggcagagagaaaaagagattcgaagcccacgtcctggaacattcaaatatttatagattggggagatgggaaggaccaacaaaagtgatgaagaaggagcaaccagtgatgtaagagagaataaaggaagagtgattttccaggttgcatgtaaagaaagtgtttcaagaaggaggagatcacttgagcccaggagtttgaagctgcagtgagctatgatcataccaccgcactccagcctggctaacagaaggaaactctgtctcttacccacctcccacaaaaaaaaggtaaattcagtattatcctgatacccaaaccagactaaaacatcacaaagaagaaattacaggctgtgcacagtggcttaggcctgttatcccaatactttgggaggccaaggtgggaggattgcttgagcccaggagtttgagaccagtctaggcaacatagggagaccccgtctctataaaaagcaaaaaaactatccaggcatggtggtccatgcctgtagtcccagctattcaggagactgaggtgggaggatctgcttgaggttgggaggttgaggctgcagtgaactgtgactgtggcactgtactccagcctgggcaacagagcaagaccaagaaaagagagagagagagaaaggagagagggagggaggaaggagaaagagagagaggggagagagagaaaaaggtatgggaggagggagggaggaaggaaggaaggaaggaaggaaggaaggaaggaaggaaggaaggaagaaaaaaaaaaaaaaggaacataaaaaggattacacaccatgaccaagaaggatttagcccaggaatgcaaggttagtttaacatcaagaatcaattaatgtattataacatatcaatagaatatggaaagaaaccacatgatcatctcaatagagacagcaaaagcctttaacatcttctcatgagaaaaacatttttaaaactagagatacaaggaaacttcctcacctgataaagagcatctgtgaaaaccacaaataacgtcatactcactgaccagagactgaatgctttctcctgagattaggaacaagacaaggatgtctgctcttgccacttattcagcatcatactatctagccagggcagttaggcaagaaaaagaaaagacatccaaattggaaaggatgaagtaaaactatcttttatttgcagatgatatgatcctatatatagaaagtaccagctaggcacggtggctcacgtctgtaatcccagcacactgggaggccaagtgggtcagatcagcttgaggccaggagtcaagaccagcctggccaacatggtgaaaccccgcctctactaaaaatacaaaaattagccaggcgtggtggtgtacgcctgtaatcccagccactcgcaaggctgaggcaggagaatcacttgaacctgggaggtggaggttgcagtgagccatgatagcaccactgcactccagtctgggcaacagagggagactccgtctcaaaaaaaaaaaaaaaaaaaatactaaagaagccaccaaaaaactactagagctaattaataaatgaattcagcaaagttgtaggatacaaaatgaatgcacaaaaatcagttgtgtttctgtataccagcaatgaatgacctcaaaaggaaattagaaaaataattccatttaaaatagcatctggctgggcatggtgcctcacacctgtaatcccagcactttgggaggccaaggcgggcagatcacaaggtcaggagattgagaccatcctggctaacacggtgaaaccctgtctctactaaaaatacaaaaaaaaaaaaaaattagccgtggtggtgggcgcctgtagtcccagctacttgggaggctgaggcaggagaatgacgtgaacccaggaggcggagcttgcagtgagccaagataacgccactgcagtccagcctgggtgaaagagcaagactccatctcaaaaaaaaaaaagcatctaaaataataaaatacctaggaataaacttaacctagaagatgaaatatttaacacactgaacattataaatattgctgaaagaaattaaagacctaaataaatggaaagctgtcccatgtccatggattagaagacttaacattattaagatgacagtactccccaaattgatctaaagcttcaaaacaatccctatcaacattcctgttgctgttttttttttttttttttttttgcagaaattaacaagctgattctaaaattcatatggaaatgtaaggacccaaaatagccaaaattatcttggaaacaaaacaaaacaaagttggagcattcacactttccagtttcaaaacttaccacaaagctccaataatcaagacattgtggtgctggcataaggctaggcatatagatcaatggaatataattgagagtccggaagttaacctttacatttatagttcattgattttcaacaggagtaccaagacgattcagtgggcagaagaacagttttttgttttgttttttaacaaatggtgttggagcaactggatatccacatgcaaaagaatgaagatggagccttccctcacacctacacaaaagttaactatagtgaatcacagacccaaacataagagctgaaactattaaacttttagaaaaaaaacaggagtaaatcttcatgctgcaggtagattaagtaagatgagggctgagagagaattgatcttggtttagcaatgtggaagtcattggtgaccttgacaagaactttttttttttttttttttttttttgagacagggtctcatgtcaccagggctggagtgcagtggggctcactgaaacttctgcctcccaggctcaagtgatcctcccacctcagcctcccaagtagctggaactaaaggcgtgcaccaccacacccggctggtttttgtatttttagtagagatggggttttgccgtgttgcccaggctggtctcacactcctgatctcaagtgatctgactgcctcagcctcccaaagtgctgggattacaggtgcgagccaccatgtctgaccaacaagaactcttttagtagagtggtggagggggttcaagagagaatgggaggaggccgggcatggtggctcacacctgtaatcccagtgctctgggaggccaagttgggcagttcactggagatcaggagcttgagaacagccttgggcaacatggcaaaaccccatctctactaaaaatacaaaaaattagcagggcatggtggcatgtgcctctactcccagctgctcaggaggtcgaggcaggagaatcgcttgaacccaggaggtagaggttgcagacttttttttggtggctcccgcctgtaatcctagcactttgggaggccgaggcaggtggatcacttgaggtcaggagttcaagaccagcctggccaacatggtgaaaccccatctctactaaaaatacaaaaaattagccaggcgtggtggcggacgcctgtaatcccagctacttgggaggccgaggcaggagaattgcttgaattcaggaggcggaggttgcagtgagctgagatcgcaccattgcactccagcctaggcaacaagagctaaactctgaaaaaaaagagagagagtgagaggaaataaattggagacagtgagtatagacagctttgaggaggtttgctgtaatgggaatagagaaatgggacagctgctggaaggtttgagagagagttttaagataggagatgtattttgtatgttgatggaaatgatcccgtagagaggtaaaaatggatgttgcaggaaaaaggtaggaattgctggtcagtacacaagtagggaggggttggtgtgatggatagagggaaggcaggacttatgagtacagttgcagggaggtaaggggtgagagcatgtgcagagtcctcatgtgagtgcttctatgttattttatggtatttcttatgaatgaaggagccgagagtgataagatgtaggaggatatggaggtttgagaaaagagagggtaagaaaaagttacctcagagagtgaatggactaggaaagcgtagctgcactgtcaggtagcctaaaagacccacaggttactggtaatatgaaagtgaggccagtttgcaagatctggtctttctctcactacattcatccatgtggatgcaggtactgagatttaacatggcttggggttttgccaccgaagtacagggaaataatcccttgccaacaattccgagattaaaaatctgaaaactcgtagttttgtttgttttggtaagtttggcaaactattgtggtggcagcacctgatctgaatgaacatgaagctatttataggctttatttatcacatatatgtgggaatatatattttgctacagaaattttgtgtttgactttggggtgctgccccagactccgctgacacatttatgacatatgcagtgtattacctttctaaaatatgaaacattctgaattccaagatacatctatccctaagggactgtgggtctgtacgacaaaaggatagcttgcaggggagttcagggtgtatatcaggggtgattatcctgatggattttggaatctcattcacctgggtaaggagagaagtaagcacaggaggagaggaagagggatgctgaaaaggtggcaggattgatggtttattgattctggtggggctgaagaattattggcatctgaaggctagagggagaatgctggaaatatagggagagatttatttcagctgggcttttggttcttaagggacataatcacagaatacaagttagtactaccctttcagtttcctacttgtgaatcgttctctagttcagaatgacttcctttttattctttaaacacaaatgacatatagtaaaagaaaccctgctaaataatgctaaaaaatagtaactgagctggtatctgagaggatctaaaacccttcttcctgcctttattataaatggagggggaggtacacaccaagacatccatctagtgaccaatgggcagaatttttgaagtgggaactcttggaaaatctaaacagcaccttctgtacattgttacttttagtatggattagaaagcatggcttgctgggtacagtggctcactcctgcaatcccaacactttgggaggtcaaggtgggaagattgcttgaacccaggagcttgagactaacctgggcaacatagtgagaccctatctctataaaaaataaacagtaaaaaaagtaaccaggcatggtggcttgcgcctgtggtcccagctactcaggaggctgaggtaggaagatcacttgagcgcaggacctcagggctgtacagtgaactatgattgtgccgctatactccagcctgagtgacagagcaagaccctgtctctaaaaaaagaaaaaaaagaggtttccttaaatttaaaaaagaaaaaaagagggccaggtgcggtggctcttccctgtaatcccagcactttgggaggccaaagcgggtggatcagctgaggtcaggagttcgagaccagcctgaccaacatggtgaaacctcatctctactaaaaacacaaaattaactgggcttggtggtgcatgcctgtaatcccagctagtagggagactgaggcaggagaatcgcttgaacccaggagactgagatttcggtgagctgagatcacaccattgcactccagcctgggcaacaagagcaaaactccgtctcaaaaaaaaagaattgcataagtcagtcacttagtccttgtaaaattccttttatttgttggaaacagaaaagcaaattggcaagttttttagcatttgaattgctttaattcttactctgtcttcactcatcagggcctaatactgatagtgatttacttacacttctagttaataattagacattgggagacacgatatatcatgcctaatggaaatatatggggtctgatgagaaagttttctgtgttgactaataaattttaacccaatggccaagcttagtgaaatattatggcctttgaagtattttagggcttgtgctgagaaaatagtactgctttattcaatgaatgaatttatcatttcttccaaatcataggccttagcgctagctccggagtggaggcatgctgcaacgcagaatcaaaaagtggaaaaactaatcaaatccttaaagaccaagggcagtgaggcagaattaggctgactttttcagtggtagcctctagctatacattctcttatttgagtaaccaaaggtggactatttgtaactttagtattaagatgcttcttagaccttatttgcataacctgatttcctttcattcttccctgtgtcattctgtaaatattgcacttccccttgcaaaaggtggctgcttttcatgcttgttgacaaaatctagaagactgcttgctacttgactctttgattttaggaatattattttgaaatagggtctcactctgtcacccaggctggaccatagtggtgcagtcatagcgcactgcaacctcacactgctgtgttcaagctatctttccacctcagcctcctaagtagctaggactatgggtgtatgccaccacacctggctaatttaatttttttttttttttttttttttttttagcgacaggttctcactgcattgcctaggctggtctcaaactactggcctcaggtgatccccctgcctcagccttccaaagcgttgtgattacaggcatcagccactgtgcccagcccttagaaatattattgaataatcactgtatgcaaaggcagtggtggagttccaggtattaggggtaagagtttcagtcagatgtatcccctgcctgcaagaagctcatagtcaagcaagcaagatgacataaacataaataaccagaacgcttggtgagtgtgtatcgaagaattcagaaaagggagaaaaataatagtttcagggaattagagaaggctccagcgaagaggacatggcatttgatctgggctttcaaagaaggatggccaggattttagatactctgaggttggaaggaggccttctacataaaggaattgtgtaatcagggtattgtgggggagctgaaggtcaggaaaagagaatcgcagatagttcaaacagaataaatgataaaggagaggatgacttctgctccagtttctcatgatctagtttggaaaagtcctttaacccatagcatactttttaaatgtatgacttaccatttttgcgggttttctatacttgttacatttttatcctttcactcttatttgttacacatcttatttgttacctatgtttgaaaatcagtagaaaggaaaattgaattactgtacttgttgcttgttagcagctgtggcgatttagctgtggaagatgatttattttaacctaaatggggtttagggactatctatgagcatgatctgatgttccacagtatttctgtttattgaatacttacgttttgctgagtgctttacttttatcatctttttaagtcccaaaacaactttgtgaggtataattaccactttataagatgaggaaactgaatctcagggagctcaaggaacttgtcttaaactacacaggtagtaaagggcagagctggaattcaagacaggtaagtcagactctttggcagatagttacacttagattgaactgtgcagtacacacttcacataagtgaaaattcatacctagaagcattagctcttagagagtgggagatggaaacctgtaactggtatttgacaagcctatttcatagataaaagatatttaaatagaaaatcctgtaactaggctgggcatggtggcttatccctgtaatcccagcagtgtggggggctgacacaggaagatcacttgaggtcaagagttcaagaccagccacggcaacatagagagaccccatctctacaagaactggaaaaaattagctgggcatgcatgcctgtagtcccagctgctcagaaggctaaggtgggagctctggaggtcaggggcacagtgagctatgatcatgccactgcactccagtgtgagcgacaaagcaagggcctgtctctaaaaccacacacactgtaactgaaattaattcagacctttattacaaagatgtcaagacatctgtcttgcagtaaaaggaccaacttaaagagactacaggaaaggttaaggtttgtggggagtatagaggaagcaccaaagatgtgcttgctctcatttcctgagaagaaccaactttttcctttaggaaatgagacacaagagggagtatagatctgtatcattttaatagtcaaagaatgagtttaaatagttaaatggcttttttgttttggtttggtttttgggttttggtttttgagatggagtttcactcttgttgcccaggctggagtgcagtggcgcgatctcggctcactgcaacctccacctcctgggttcaagtgattcttctgcctcaggctcccgagtagctgggattacaggcatctgccaccatgcccggctaattttttttttttttttttgtatttttagtaaagatggggtttcaccatgttggccaggctggtctcaaactcctgacctcaggttatccacccacttcggccttccaaagtactaggattacaggtgtgaaccaccgtgcctggccccagttaaatggttttttttattttaaattcaagtactcttggaatggggaggggaaaaaaggataattctcatccgcttaaaaccatccaggccgggcgcggtggctcacgcctgtaatcccagcactttgggaggccgaggcgggtggatcatgaggtcaggagatcgagaccatcctggctaacaaggtgaaaccccgtctctactaaaaatacaaaaaattagccgggcgcggtggcgggcgcctgtagtcccagctactggggaggctgaggcaggagaatggcgtgaatccgggaagcggagcttgcggtgagccgagattgcgccactgcagtccgcagtctggcctgggcgacagagcgagactccgtctcaaaaaaaaaaaaaaaaaaaaaaaaaaaccatgcagatttgttgaatagaccagtctatgtgtttgttgtgtaggtcatctggcctatgtaagacatgtgagaaggagaatattgtgtggggaagtcatatcattgaaaatggcaatgacaaagatatgttcaaaaacaactgacaaaaaacaggtaggtttctctattcctaggtcgataatggtgccctggattagagccaggttattgtatattgactccttttgtgtaaaaacactgaaatggtatgtgtgtgtggtgggggaaatgataaagcaaacacagatatggtattttctctcagaaataattgttttctggccgggcgcggtggctcacgcctataatcccagcactttgggaggctgaggcgggcggatcacgaggtcaggagctccagaccatcctggctaacatggtgaaaccctgtccctactaaaaatacaaaaacaaaattagccgggcgtggtggtgggtgcctgtagtcccagctacttgagaggctgaggcaggagaatggcgtgaacccagaaggcggagcttgcagtgagccaagatcgtgccactgcactccagcctgggcgacagagcgagactccatctcaaaaaaattattattattattattttcccctctgtgtatatatggagctccttcaaggggcccctgaaggggatggagtggtgattgtgttcagatggagtctctgctctcacacagcatacagtcagcaaggggaggaggtagacgttatcaaggagtccatgagtacagtgtacagtaagaacagcaaaggtatggtgcatgtgtgtgagtgcagctgtggttaagaaaggtttccctcaggaagagaagatgaagtggagatttaacaaatgagtagaggaggaggcgtgggaggtcagtggctagggaagcctgttcccgcagtgcatatgcagaagcagcctctggtgtgagggcccacggagcatttcacgtacagaatgaagcctggtgggcctgcagcacagaggcggaaggtgggttaggttggagaggtagacaagggccctagtggtaccctgttaaatgtcctgacacatttgctttttgaaaatactactcttgagtacaatgaggagacaaaaatggagggacaagagtaaatgagaggaaatcattacactgcctcaggcaagaccatgtctgttttattcttgtttctccagtgtgctcaaaaaatatgtatgagggccgggtgttgtggcttacgcctgtaatcccagcacttcaggaggccaagacgagtggattacctgagttcaggagttcgagaccagcctggccaacatggaaaaaccccgtctcaactaaaaatttatacaaaaattagcccggcgtggtggtgcacgcctgtaatcccagctactcgggaggctgaggcaggagaattgcttgaaaccgggaggtggaggttgcagtgagcagagatagcaccacggcactccagcctgggcgacagagcaagactctgcctcaaaaacaaaaaaaaagtatggggtgaatgaagatgatagtagcctgtactgggtggaggcagcggagatggagaaaagtggacaaattcgtgaatataagacttgagatagttgagatattgggtgtaagggaagaggaatttccaggggtaactcttaggtcattgaagccttgagaacagaaggaagttcttgggggaaaccctgtggagtgagaagaaaataaagattggaactgagtcgtgaggagtggcagtatttaatggctggctagaggggctggctgaatgtggagtaaagacagagagatgcctcactgataccgagaaaagagtgtttcagtgaggtgagaaagtccagtgtcagttgctgcttcaagaagtctaataggatgagtagtgctagatgcccattagacatagagatcttgagaccttagcacaggtagtttgaatagaataatggaagcagaaatattaggtggtggagttgttggttcgggagtgaatgggcaatgtggagtgggaacatatagttggggaataggtcattttgtgccaattttgtattataggaaggtatagtaattccttcccaactatttgaaattatagtatatgcaatttattttttgtatgcctcaaatatggtatataaaaattgcaagagacttcttttggggataattttttttttttttaagttgaggtctctgttgctcaggctggagtgcaatggcgcaatcttggctcactgcaacttccgtctcctgggttcaagcgatttctcctgcctcagccaccctagtagctgggattacaggcatgcgccaccatgcccagttaatttttttgtatttttactagagacggggttcgccatcttggccaggctggtctcgaacttctggcctcaagtgatccgcctgccttggcctcccagtgctaggattataggcgtgagccaccacacccggcccttttggggataatttgaaagactagggagctgagaaccaaaaaaggaggtaaggcaggaggtagagcaaaaatagatacattttcactaagaagtcttgtgggagagagagggaattcacaggaagagtaaacccaatcctttgagtctgcttttgtatctcccagtgaggaagtttgaggaaccctgactcagctaggctaagtaagtttgatagagggttgccccaagctttttccttctcaagcatctgtggctatgaactgtggaagcctaaaaagtaggaatcaataactctgggtcacaaattcagaaagccaaggaatatgtggtcataaagccaaaatgcttttaaagttacttggtttttcaacaagggtgccaagacagctcagtggggtaagtagtcttttcaacaaatggtataatgggatatccacatgtaaaagaatgaagttggacccctaccttacactatatataaaaattaactcaaaatggatcatagacctaaatataagagctacactattaattataaaccttttagaagaaaacataggagtagagcttcatgaccttgggttaggcaatggtttcttagatacaaatcaaaaacacaaatgacaaaagaaaaaattggactgtatcaaaattaaaaactttcctgcctcaaatgacactctcaagaaagcaaaaagacattacagaaggaaaatgaataagggactggtatccagaatatataaagaactcttacagctcaataacaaaaagacaaataacctcattttaaaatgggcaaagggtctgaatagacatttctccagtgaagatatacaaatggccagtaagcacaggaagatgctctgcatcattagccattagggaaatgcaaatcaaagctgcaatgagaatgtatcatacctgctagtatggctgtcagtcagtgtttacattattattactaagtaaatgttgttctcaagtgtcttagtctgttctgcattgctatgaaggaatacctgagaatgggtaatttttgaggaagaaaggtttctttggttcactcttctgctgctgggaattttgggcttctagtggaagcctcaggctgcttctgttcatgaaggaaggcggaggggagctggcatgtgcagagatcacgtggcaagagaggaggctagaggactgaggcatgccaggctcttttcaacagccagctcctgggctctaatagagcgggaactcactccccacaaccaagggaggacttcatctatgcatgagggatctacctccatggcccagacactttccattaggcccctccaacattgagagcaaatttcagcatgaggtttggaggggacaaacatcccaactataggaacaagcgctatattatgattacatttttcttacaaatttgttttttcctagagctaataatgcctgtttttaaaagatttgcctagttttctgtgtaactattgctgtttttccctatatactccacatgccttgaatatataaaataacctatccttttgcacctcccttctactttttccccttggagacctcatcctagagctctctggactcttctggcgtggctgcacaccaggcctgctggctgtattcctgggacttgcctttgcttcttccctgagttagacctctcgtttctaatatcttatgtcttgattttagtatactcatttactgaagtacatctttctgtgaaagagtacacagaaagtaaattgttgagtccttacgtgtatgaaaaatgcatttatgtaactctcattatacttggttaataatttggctgaggaggcagaggctgcaatgcgctgagattgcaccactgcactccagcctgggtgacagagcaagactgtcttagtaataataataataataataataataataataataaggctgtatatggaatttgagtctggaagtcattttccatagaattttgaaggtaccttgctgtcctctgctatctgctcttgctattgagacgtcttttcccattcagatttccattctttaatatgtagggcgactgtataatttattatcaaaactgggacaggtaaagtgctagtctgacagcatattaggacaacaggtgtaaaccaggactttcttggtaaactgggacatatgatcacctctttatatgtaacctgttttttctttaactgcttaggatcttctctttacctctggtgttctacatttcatgatgatgtgtcttgacagaggcccttttttattcattgcactaggtctttgcagttgtattcctgttctttctttgatttgggaaaattttcagtattccttcaaacattttctcccagcctttgttagttagatgtttgactttctggattatcctctaaatttttgtcttgtcttgcaaataagcaaggggatattatctttttgccttttggctttctttttgttttatatcagagattttcattcatttaagttcttctgttggattttttaaaattttctgtttagtgtttaatttctcattttagtctttttcacagcatcctgctcttatcaaagtataccctctcccactcttgggatattcattgtaagttttgggggtttttttctcctttttaattatttattttgttctctgcattgcttccttgagtctcttttctatttgtttggtttgtgcatgaggatttcctcagatgcaggcgatccttaactgtctgttcatatttaagagtaaagcattaaagtttattattcggaatctctgaaacctgggcagagctttttggcttctttaaatataattatgctgtgaactgacctctttgttagagtagccttggatgtcagaatttgtatttgtttgctttgttttctatatatctatttgtttgtgctgctatagtaaaataccacagactaggtaatcttaaaagaacagaaatttatttctcacagttctggaggttgtaaagtccaagaacaagaaggtggcagtttctgttgtctggagagggctgctgtctgcttccaagatggtgccttgatgctgaattcttctgagggaattcacatggcagaaggtggaaaggcaaaagggacagactccctccatcatgcccttttagagggacgcctaatcccatccacgagggcagagcctgcatgactcagtcacctcccaaaggccattccttccaatactgttgcattggggattaagtgttcaacatacggattttgggagacacatgcagaagaccatagcaactttgaaatctaattttgggggtgggagggcagacaccattcagtttcttccagaaaaggctcctctgctttcctgcctaggaaattatagaatgggatgttagctttctacaaatgaggtgggagaaagggagaggtttcagagattaacatagagcctttcccttgtacctcattccagccttctttgcctggtatcctctattctggagcttctgtggttcaatatttccaaagaataaaatttcttttctctcacgagaggaggtgggtggtagaggtggttagtcacttggctgtgtgggataatggaggaggcccaagtggttctgctccttctctttttcccaccttgcgtggtaactgccagagagctgatcctcacaggaattctgcggcctaatacaattagcttcatcttcacctttattcactctgggcatttgggtgataacttctccatctccttactgtcttggaaaaatttatgaaaatatgcacacattagtgctccttttctcttttttcttaggagttaatatttattttattcctcaactgtctcttagaggggttgagaagagataaactaatgtgttcaatctgccatttttaactgtttctagcatgcattttttctaatgaaagtattataaatgttgattagatgcttaatagtactattagtcctgttcctcatgtatattggtatgggttaaataggtttctgtggccaacctgaaaacctaactgtatctatgattttcccttagaactagaggtataatcaagcctttccgaattgattatctggaggaattttaacagactagagcaaaaacattttctctctctccattttccaaatcacatagaaaattactacaaatactatatcatcattgttgaaataaaaagctctaataattgtaacagaaacttgaattttagtagaaaggtttatttgtaaagttaaagctatacaaattaaaatcagaagtaaaattgaattcttcagccaatatctcaaatctctttttttttttttagcaactgttttgaaagcaattttctaattaaatttaaacccagtgatagtggtagctttgggaaaatagtaatagccacgggaatcatttgtttaactgtattttttgttgttgttgctttctttttcttaccatggacacaacagaatcttctgaaatattggactgaataaactagacctagctagatagaccaataaaacaatcttccaagtcatgaatgagtaaaaatagttatgcaaagcacttgtgtgcgaaaatgcagctcagaatatgtatagtacacaaagtgtttgaaagtaaatgctgcaccaacttggtgttggaattgcagagaccactgcagtggggagctccaatttccagcctttggcaagggcatattcttcccgaggatcaccctgttgtgctggggcagccttccatgagcacttgcaccccggtgaccctgattgcccagtctcaagggatctgagaaaattaggaaaaccaggaacggttgttgtaatcttttgtatggctggaacgaggtaagggcaatgaaatgcagttattccattattttccttcctttttatttttctttctcttttatttcttcttctttattattattaaccactccccctcactccccctactccttgcttttgacagaatattgactaggaaccagaagcccatttctgcttagccttaagggcagctgtttacacagcagcagtgttacataggtttactgtgtcatatgtctgtgtaacactggatttggatcttgtatttagctgccagaagtgactgtgatgaagtaggagagataaactgatagattggctgccagaaagatgttgggaatcaatcagataaacagggtagagaaatagcttgctgttttctagtgataataaaaccagcggcttctggtccctgcattcttaaacataattgctgtagtaataatgtccaaaataagcaaatgaaaaaacatcatgggaggttttctaattgcaattgagatatccttttcccttttgcaataaagattcatcttttggaagtgaatattttttataaatttgttttacttcttccagtgcctacttacataaacatatgaaattagaaagagatctgctttcagaggaatttatttctctttcttcatttgaaccactgaagcccacaggcttcagctatttgatttgatgaaatatctctattgccaccatgcctcacctacaaaatcattgctaatttttatgaagaaacaagttttaaggccaaacctggattattgacagatgattagcagaactagtttatcttagcgtcttctcttaaatttctctcagaagatttttggaattttaatctctgtttctctttctctgcatatagcacttatagttctattatcgtaattcagggtttttctcccttagtgtttaacttttaaaaccattgcttctcttcgcccaaggactttaagattcagtgcagattcttaagtctgtatgaaaggtacagatgtagatttcaactgggtgcagaggagtcaggcttaaaatgacagtaggagagtcatttagaataactcccatggagttaattgtattggatgagagactaatcctctgtggtatatttgcagtatgcaaatgactttctttagattccctcttaaaatttgtgtggctatgaatgtgttggtatcatgtgtggctaaagcacttaatagcaagcatggtagagtagcagctgtggaaaacaagaggccgatgcccacacttttaattacatacagtaaaggctttttgcctgaggaagaccttcctgactgttggaggttatagttcagaagttaaccttgcaccattatcctgttggtgagaagctgatgcatttccctttttgccacacggcccttcccacctgaccttttaaagattctccattgatatcaatggagtggacaaaactaatcataaaaataatgaagggaatgttgcatactcattgatctatttgaaatgaactgcggtacaataagtcttccaaatggacttctgttctcagctactgctatagccacctttttaaagatatataactatgaaagcgttaacgggaattcagtaatgctcttgccactgggttgtcccttattgattgtagttttagagctgtcactatgccattcagaattccttctctgcccttttaaagtcagttgtactggaagatgataaataaattcgttgctttcctttttcccctagctccttcgagaactcatagaacggaagaccagctccttggatcccaacgatcaggtggccatgggaaggtaatttagatacagctttctgttcatgcaagcagcctatgtaatagtttctccccttgagtccctttaattctacctgcaaagcaatgattggtcctataattattgaagttaagcaagtaagagctagaaagaaaatgtgactaattgtttaccctacattgcctaaagtgcaatttgtaaagaaattataaaacacctatgtgtttgtttttagagtttgttttccaaagtctttcttatgctctttgctccctggttttgcattgtgattgtatccatatcaatctgttgaccagtggatacaaagcagccatccaaatgtgagctctcagctgtcagaacatggcactgcgcacaacaggttctttgctctcagtcgaatctgctttgttagagtctgccctaatttagacctccacctcttcagtaaaagcttcagcacaattagaagtggaacgtggcagcattacccagatgtcagggcagaatgtaaagtagtgaaggaaggcccttgtgtgtatgcttcatcctgtggttggaaaataaaaagggcatttagaatgctacctaatgaatagtgtacatttaaatagccatgagccataatttgcaaaagcatgaaaggaaacaaaagctgcaagtgccagaatgggattctaggcagagcagccattcgagaaagcagtgaaaaatttgtgttgatgaaataattttatttaagtaaaatattatgtgaattttagggtaggatgttgatatttcgtttatctctggaatgttatagagagctgttcgctataaatttaatgtgatagagcaaattgcatttaagtggtgattatattgtacatttatctgactttacaataaaatagattatggtaattaagattatattaagattacagtaattggatttccctagattttttttttctggtgttgaattttcgttgtataaatcaggtaggatgactagctgctgctgctgtttctccttctttttctttttttcactttagttcatatgagcaatttatgaagattttcttagcctaatatcccttattgaaaaattaattccttcttatctaaaatgactgcagaatatgtgaatcttgtttggattctgatccaaacaagccaactgtaaaattgagacattccaggaaatgtgaagactgactgaatatttgataataaagaattattgttgacttttttttttagatgtggtaatggtattgagattatattgaggggagaagagtccttatcgcttctcttgtatagcaacacgtactgaaatatttatagatgaaatgaaaattaacaatttaaacaatttaaacaatttaaaacaattaaaaactagtatcagtagtggataattatttaaaaattagcaaaaattggaaagcacaagaaaaagcactggaggattaccaaagggaaagttagattttaaaaattcatgcattcaaaccaaccagcagttgcaacattagtaacagaacatgctgcatagctaaaacattaaaagaaaacccaagtagctctactaaatctgatgggtttgcctgcagactggtagatttagtgcttgtcacagcaactccaaatactaaggagcattgtgaaccaaatttgctgtagaatttcccagctgccgtttgtttttttaccattgcacaaatcctgttcaattgattagtcagtttggccccaaactagcttgaggaacttgatgtaggttgatgatttctttctgcagggttgttagaataattccaatttgtcaatatgtataactatttctgttagtgatgatgcataacattgcttgtgaattttccaggcagtggcttgcaatccagaagttacgaagcaaaatccacaaaaaagtagataggaaagccagcaaaggcaggaaacttcggtgagttacttttcggaaaaaatgtcaacatatattgtatatgtatctcgtctcttacattctggctgttatgtcatttttctttttcttctgatgattctgtttttaaggatcagaaaaataaacaatatttgaaggtttattgcaactcagtttttcttattctaaaatggaaatatagtttcattgacttttgtgctactgttgtaatagatgggtgaaataatatatgcattcccttgaaagagaaaaaataagaaaacaaaagtaaaatagttgaaattatattaactttaacaattaatttctatagaataatataaaaatgttatggccaggcgtggtggctcacgcctgtactcccagtgctttgggaggccgaggtgggcagatcacttgaggtcaggagatcaagaccatcctggccaacgtggtgaaaccccatctctactaaaaatacaaaaattagctgggtgtggtggcgggtgcctatagtcccagctactcaagaggctgaggcagtagaatcacttgaacccgggaggcggaggctgcagtgagccaagatcatgccactgcactccagcctgagtgacagagcgagattctatctaaaaaataataataataaatacaaaaaattagccgggcgtagtggcgggcgcctgtagtcccagctactcgggaggctgaggcaggagaatggcgtgaacccgggaggcggagcttgcagtgagccgagatcgcgccactgcactccagcctgggcgacagagcgagactccgtctcaaaaaaaaaaaaaaaaataataataataataataataaatataaaaatgttattgtcttattggtccatttttatgatgccatatgtgcacacagtatgctaaaaagatataagtgaaggaccacagggaatgttaacaaagttattaaatgagaagagaaataaaatgtttatgagaaaatagagcaatttctgactttaggaaaatcctcccctgtgagctctttaaggagttttataagggtacagataaaagaaggagcaagagtggaaattgacctcgctatacttttagacttggtaactgccgtgtgtgtgtgtgtgtgtgtgtgtgtgtgtgtgtgtgtgagaaacacagtgtcatcacacaaagcctcagtgtcaaactacctgtaattcaggtgcacactgagagaaaatcttaaacttgtgttaggatagttttaggcaggtagttaaacccacatccttattagaacctgcctatcattaaattccctttagacaaatgtgggtctatctgatttttaaagatcttcagagaagtagatttctcaattactttaatgaacttgttttagtatttaacacaactcatcaggaaatgctgatttttctttaactttgcagaagtacacagtatcaacagctttgcaaagtatcgtcctttgatttagggtcgcttttttaaaatctcaggttaaattgttataatttctttacctctttttatgtcttgaaatttccgaatcttcataattctctaggttcatttttagaggtgaagagcatggacttaagacccagactgcctgagtttgaatcccagctttgacattgattagtagttactttgggcaagacccttaaactctgtgctagtttcttcatctgtaaaatggatatgataatatatcagccttgaatggttgctgtgacgattaaatgaatagggtgtgtatggctcttagaatagtgccaggtacatagttaagcactgtacaagtgtttgttgccattattactgtcattattattgctatcagtattccaaggttgggtcagtctcttttcctagtgttcatttatttgtttactgacacgtctcttccgtacctgtctccccccagcccccttcaaggatttaaagaaaaatgttactaatagtacttcataggtgactaggctgaatgattatcttattttttatttttgggatcaaatttttctccaatactgtacttttaaaattgtaattttatgaggacataaatgttctctagaaggaagagcttaggatttcaaatcacaagacttgcgttcaaaccctgactctgtctggtgatatgattttggttgttctttattctctgggcctcacttttctcatttactaagtggaggtaataatccctgctttggggatttggtatgggaattaaatgaaatcatgtgtaaatatctggtacatagtaggcattcaaaaatgttcaatatatcagtttgaaaagaaaaaaccaggattttgttttaatagcaactgctttttatattaatgaattcaactagcttcattaaactgttcattacaggtatgtgtcaatgcaattagatacctttgcttttgcagcattttgatagcagtggagatccccacattctcatatccagaggcagtaaaatcttattctttttaaacagagtttaaaaagaggcattctttttaaacagagtttaaaaagaggcattctttttaaacagagtttaaaaagaggcattctttttaaacagagtttaaaaagaggcattctttttaaacagagtttaaaaagaggcattctttttaaacagagtttaaaaagaggcattctttttaaacagagttaaacatgaaaacatagtaagtggttttagtgtccttcaccttctaagaagatggtcattaggtggtagttaagacccagtctgccctcagggagcatacacagtcatttgtgctatctgtggaggattggttccaggacgcacaaacagccccacacccccacccctgcagaaaccaaaatccacaatgctcaagttccttatataaagtggcatagtatttgcatataacctacacacatcctccctatactttaaatcatctctagattacttataatacctagttcaatatgaacgccatgtaaataattattacactacactgtttagaataataagaaaaaaaattgggacatattcaatatagacacaatcatttatgtcttaagtatttttgatccatggttgattaaatctgtggatgctgaacccacagcatcagagagccaactagtctggagaggatggcagaccctagccgactgaggtgctgtgtgggaggtgtagcagtagaaataatcctgctccacccttgagggatgcagactgctcaggaagacttgcacaagacgacttcctcactgagccttgagagattagtaggcgtttgcccagtgaaagacaaagagaatgtgtacaaaaaggtttgtaagcttgagagagtctgggacccattttgggaactgtaattaatttgttttggcagagacttttgtagcaaactggaatttgaactaattggtctgattccagagcctgttcttttaacctctggctgttgagttgtttcactggccaactggcctataccagcaccaaaagtgaatatgagagaatggcaggagataaggctgcatgcatgggtgagtgctagatcatgaccacgttaagaattttggactttattctgtagactgtagtgagtcattgaaagattttaggcagaggaatattgtcatcacatgcacatttcagaaagataattggctgggcacagtggctcacacctgtaatcccagcactttgggaggctgaggcaggtggatggcttgaggtcagaagtttgagacaagcctggccaacatggtgaaaccccgtctctactaaaaatacaaaaattagccaggtatggtagcatgtgcctgtagtcccagctactcgggaggctgaggcgggagaatcgtttgaaccagagaggcagaggtttcagtgagcggagatcatgccactgcactccagcctgagtcacagagcgagaccctgtctcaaaaaaaaaaagataattgtaggagattttctataaaggactagaaagttatgagagcaaggcctggaaggaataggagatgacggattgagagacatttatacaggtgagtagttcttacttaagagtggccacacatgaagaggtaaaggaaagtgagaaggttggaatgactcccagagtttcagggaactagataggtcttggtagtaatcattgatatgtataagagagaggctgcaaggagaacatcttttttgttgttgttttttgagggagggagtggattcagtttctgaatatgttgaagtttgacacaaccttcagaaatccaagttgagatatttttcagtcgagaggaggatgtgggtatttattagttgatagtttggcaacagtttaattgctgtttacccagggagggtacggtgtgacaagaatacagagtgacaagagtagaatcctgaagaatgtcaacatacgtgagctagagtaagaggagcccataaagaatgctgaggaacagtggccattgacgggggagggcaggaggaggttacgacagcgatgaatacaggacagtgtttagtaaggggtcaggagcgcctggtgcctcagagaaatcacaaaagggcagcatcgtttcatttgtgatcacatttcttcacatgaaatgcctttggttactgaagagttccagaaactgcaaactaaaactttccatacttgaaaggcctctagaatttctgtgtaaacttttactatcttgattagtttgtttcataaaagccttttggaatccagttgtaaagggaatgagagaaatagaaaaccaccactagggaagccccacagtaataatttttgcaggcaaggtccacaatagatgctaaaatcaatgggcaaaaatttgaggagaaactgtatttatttggtctctaagtatctcccccaagatatttgtccattacaaagagaaacatagtggctttgcaataatctagcagatgccaccttaaccaagtgttcaagatgaacagcaccagtaaaaagacatatctataccccctgtgtcttcagtagaaagatacaacatcatttctgtggtattcttgcaaaaaaatgcctaaccttaatctcatcataaaacagcatacaaatccacattgtgagacactctaccaaataaatgaccagtactcatcaagtgtcaaagtaatgataaaacaaggactgaggaactgtcacagattgcaggagactaaggagacatcacagcaaggtgtaatgtggggtcttagaagcccaaaattattacagaacaaaaagtttttaatgtaagttcatgtgtgttgaattggttttggttttgtcatctgtactcacctggctcatcttgagaccataaatgtgaggatgtggtcagaatcagagagtagtctttactcatagcaatagcgtaagaactaacatctccagaaatcccaggtcaggcactgctaatcagtttacatgcggaggcagaaagagcataagctctggagccaaactgcctaggtttgaaagctgacttttccatttcccggccttgagactttgaacaaattactttacatctctgtgcttcaatttcctcatctgtgaaaggagtataatcatagaagtgacaattttatagggtggttatgcagactaaatgagctaattcatgtgatgtaacatccccagtgttacatagtaagtagcaaactgggatttgaactaattggtctgattccagagcctgttcttctaatctctggatcttgagttgtttcactggcaggaccaaccctatacaggcaccagaatgacatcttggccaccttagcatcctttcctaaggggttaaaccaagtggccccccaggctagatgagaatattataaacaactttcttgagttaaacttcaagaacagacagtgtatgccagctgtcatcactgatactaggtcccaccattgagcaatttttgctccttgtttgtgatagggttgtatatgtaagacttccagaaatgttgtagcaaagattaacattaccttctggaaacagtttaaataataacacttcattagtttaaatggtacagcctggtcagacttgctaattggatgctagaaaataacgttttttaaaaaaacaaatattttggtttttggaaatacagtaattataattattgattgtcagtattctactcagcattacatataagtggatttagttatgatttaatcagaaatcataatgtaaatggatcaaactcccaagcctttaataatatgacgtcttactgtgttggtctgttcttccacaacaaaataatatttgtcttttcttagtatggttggtaaaagatgatttaatattaaaacatacacccatttgcagtggcaccgagactagatgctaagtacagattactaaatggtctttaatctgatttcttcctaaagcctgtatttcatcatgtagttaatagttattaactatattgtattaaatgtaaagatattctacagagcagtaccatctaataaaaatattaatatgtattatatatgcaattttaaatgttctagtagcgacattgaaaaagtaaaaagaaaaagatgaacttaattttagtgacatttcatttaacccaatatataaaaatattatttcaacaatttactattttaagaattattagtgatatgtattttttttgtcccaagtcttcagaatctcgtttgtatattatacttaattacagtacatctcaattcagactagccccatttcaaatgcacagtaaccacgtgtggctagtagctactgtattgcataacacaactgtagggtacagttcatagtctttgtccagaaagtgaattaaagccgtctctggacacagccaagaatagtaatcatactttcagatggacactgaagtttagtgaggcctaaggacattaaaagatatatttaattaacagtatttttggtttatatttaaataaaaaggttatataaatatttatgctcatacattgacataacttttgggaaggcattttgactcagtcaagtttacatatacatacctttcaactcagcaatttcacatctaagagttatgtattggccaggctcagtggcttatgcttgtaattccagcactttgggagactgaggtgggaggatcacttgaatttaggaatttgagaccagcctggacaacatagcaagaccctctctctaccaaaaaaaaaaatttaaaaattagccaggcatggtggcgcacacctctagtcccagctccttggtggtggtcggggctgggaggcagaggtggggggatggcttgagcctgggaggtcaaggctgtagtgagccgtgatcgcacactgcactccagcctgagcaacaaagcaagaccctatctcaaaaaaacaaaacatcaccaacaaaaaaacaaggatacatagaggccttttttataaaaagtgaagaattagactgggcatggtggctcacgcctgtaatccgagcacttttggaggccaacacaggtggatcactcaagtccaggagttctagaccagcctgggcaacatagtgaaaccccatctctactaaaaatacacatattagctgggcatggtggtacactcctgtagttccagctactcaggaggctgaggtgagaggatggcctgaacctgcgagtcagaggttgcagtgagccgagatagcaccactccattccagcctgggtgacagtgagaccctgtctcaacaacaacaacagcaacaaaaagtgaagaattagaagcaatgtatgtgttcaaaaatatgaaaatagggtacttctgttcctacggttatatgcagctatttataaattgtttatgggacattgcttataaggctaggtgagaaaagaattcattcaaaattgtgtgaatatatatatatataaggatcattatgtgaaacaaacgtaacaacaattgtctataggtagaaggattgtgtgtgggattttttgtttgtttgttttttagataagctcatactctgtagtgagccatgatcacaccactgcactccagcctgagctacaaagcccagaccggagggctcactgcagtctcaacctcctaggcttaagcaatccttccacctcagcctcccgagtagctgggactacaggcacatgccaccgtgcctggctagttttcttacttttttattttacttatttatttttttgagacagagtcttgctctgtcacccaggctggagtgcagtggcctgatctcggctcactgcaccctctgcctcctgagttcaagcaattctcctccctcagcctcccgagtagctgggattacaggcacacaccaccacgcccggctaatttttgtatttttagtagagagagggttttgccgtgttagcaggccaggctggtcttaaactcctgacctcaggtgatccacccgcctcaggcttctaaagtgttgggattacaggcgtgagccactgcacccagccagtttttttactttttggtttttgtttgttttatttttgaaacaaaatctctctgtcgcccaggctggagtgcagtgacataatctcgattcactgcatcctccatctcccgggttcaagggtttctcctgcctcagcctccctatttactgggattacaggcatgtgccaccacacctggctaatttttgtatttttagtagagatggggtttcaacatgttggccaggctggtcttgaactcctgacctcaggtgatctgccccccctcagcctcccaaagtgctgggattacaggtgtgagccaccgtgcctggccagttgtttttactttttgtagagacggggtcttgctatgttgcccaggctggtcttgaactcctgggctcaggtgatcttctgcctggcctctcaaagtgctcaggttataggcatgagccactgcgccaggccaactgtatgtgttttctgtgtggtttggttttttttcaattttctgtattttataccttttgtattactttttttctgggttggtgtgggggtatagacagggtcttactatgttgtccaggctagttttgaactcctagtctcaagcaatccttctgcctcagcctccccaagtgctgagattacaggcatgagccaccacaccctgcctctattacttgtataataggaaaaatcttaaccagtattattcttgtaaaattcatttgttgagataaagaattacctttgggaggctgagctgtgggtgatataataaataattaaattatttgatatgtgtaaaaatgttcctaaaactttaaaatattatgtattaaatacatgaaaataccacattttgttttatggatagtgttttgccctagtagagttttttgggttagaattttattttatgtatatagagagggcacattataatgagtagaaaaggatacccctttgaattatctttggtatgatttggtctgtataaggtcatatattttctagagcatctcaaacacatcatacaaaatatttttttttccatttggtgggaaatgtaggtgatataacttaaacttccatagtacctagactgaagatctaggaatcaaacttactgtgaattcagttgtgtttctccatttaaaggtgggggaaatgaaagaccccctggatctagtgcatggagatgacgtggaattgcagaccccttttctgccttggggaaccagtggcagtgtgtgtggtgttggtgaggtgttgcattcagatactgtaccactacctgtgctgctgccagtagatggcttttgtgacatctattaaaatgaaaaatgcttaagatatatgtagaggaagaaaatgaggtagtcaattcctcattgtctttagtctggaataatgtttaagggttgtatattgctcaaaagcacaagtgtacctgttcttttttggggctgtactataaatgaatctgtgttgaactgtcatttacagtatactgttatcagacttttctcctgtagcattagggaaaaagggaaaaatgtacagtcagccctacatatttgtgagttccacatcagtggattcaaccaaccacagattgaaaatattcaggcatggggaaaggaatgtctgtacctgtgaacaagtgcagacttttttctcgtcattattccctgaacaatacattgtacaactatttacgtagcatttacattgcattaagtattttaagtaatctagagatgaattaagtatatgggagcatgtgtgtagattacatgcaaatactatgccattttatataaggaacttgagcatccgtggatttttgtatccatagagagtcctggaaccattcctccacagataccatgggatgactgtagttggtcatcccaatgacagtggtaagtgcctatgaatttttccctatcccactttgtacccagatgttccagtgatcagttctggagtttgttaactcactgaatgtgtttcctctcctaggttaatagttactaatgttgctgcctgttgcttcctgctttatttaggtttcatgtccttagcaagctactgagtttcatggcacctattgaccatactacaatgaatgatgatgccaggtgagtaatagattaattatgtgtctcaaatggcttcatgacagcctgatattgacctgctctacagccttcgccctctccatttcttcttatcagttaaccatttgtcattggcatcgcagtaagggtcacatctcttcaccctcataattactataaaaccaaaccaaaaacttgcataaatttcagtgctgcctttggtggtttgtttgtttttcctgttttgttttgaactttagcccagcgccctgggacatgtgagctctctaggacagggcaggtggcccatgttcttgccgtttgtacttggggctgttgtgcatatgctttccttttgaaagtggctctagtgagtgctctggagatgtgcatatgttgtatttgttggggattgtgagtgtttttacaaaagatgtatatgcttattttataaagctgaaacgagagaaatacagaaaaaaagtgtatgctcataatattaccgttcagggataacctttttaaaataatagtttcttctgtatctattaattggcattctataatgaagagcttcctcttctccctcatttatttaccatttatttattcatttatatcaatatggactcatgttttcctattttattcaatgagttatgtttattttgatattaaaattgtcccagatagtggaagtgccgtcaaactggcttgtgtccttcaaagttgtcttcagtcaatctttgagtacttccttactttctggcacaagaagatgtttaatgctcatcttagactttccatcttccagccctgaaatcagtctttcttgaaggagccctggctctgtttagtggattgtggtatttagaaaccaagatctaggtactaggggtgctccttgttagtgagtattgctatttctagacctgtcagcagagacgggaagtgtatgtatatacactcacacctacacagaagacagccacttttaacatcttacagcatttcatttcagtttttgtaagttccctttcagtattttcctgtttttcttttttatattgaaattatattcaggaaatgttttatatactgagagcattttcatgtcgttaaaataattaaaatttttcaatgacgaaataatattgttataatatttatttagccattcactgattgttggacatttaaatggcttttaattgtcatcattgtaaataatgctatgagaagcatttttaaacatatttaccaagtgaaattattggtcataacataggcacaggtggtttttgccagttttatccctcaaactacatataaactttttattttagagtattttgtttgctaccaaatgccatcagattttcccctccttgtctgaaagtatgagatctgcaaattttgacaaatactattattattttttatttggtttattcagtactttgagcacaaaacagcctatggatggttctgagtacatttgtgtctggctttgtgaccacatctgctatcctgtgctttgcaagtgaatgtctagatatggccatggttttttgttcatttctggatccagtctgtttaaaaattgcagagtaaagtgagtgcatcttagattccctgtcaggatgctgtgaaaaaattatatcaagaagaaagcaaaactagattttgaaaattaaaccaaaccctttaaggttacgttattatcccaggcataaaatgaaatctagtttagatattagtggtatcttttgatcatagtactatgaaatcattcagaaatcaactttatgccattcttagttggaattttacttgaatcccttgaggtgtacttagtttttccagaatcttaccaatattaactcctaatttttgaaggtctactatttgctagacataaaaattatttgaaaatgactctattaggattaatttgggtatggcctataaaaaatataaaacctgactacagaggcataaggaaatggaagttcatctttgtgacaggataattctaggggtggtaggcaattgttgtccatggcttttgcttctcggtggtgttagggccaacatctcttggtctttcccctgtggtcccaagatggctgttgcaacttaacgccatcaaacatgcattcaaggcaggaagaagaggaaagaactgtgccagccatacctgtttgtttttaatcagaaaagtaaaaccttccccagaattcccttcagcaaactttttgtatttcattggccagaactgtgttatgttgccactccaggtagagcaagcaagggagaaggggttaggaatgtgtttgctgggtgacagtccttgtgacatttataaggagaaagggctatcccttgtggactgattcctaattaccagcattgttctccagctggtttagctacttaaggaatggaataatagtcttgtagctggagaactgaacatttgtttttaccaaagtgcgcaccattctcattgtgtttcctaaggatagggagacgtgtccatatcaactgctcaagctttatggtttgaataggccagattaactatgggtacagtaaataggaactagctctctctcctagtatcaaaatttttagggccagtaggtattgttaactttatcttaagtaagaaggaagtagtaatagcttatcctcctttgtttttttttagtggaaaaacaaaagtggaagtaacctagtaccattctattttgtgtcccatttgtacaccacaaataggaagctttcataattgttagaatatcaatatcactgcatgctacttttcctcaagtaaatacttttggttttcctaagttatacatatgtcattcttggtgtgccgggggcatagagaattttttaaactgatttcaaggtagtgaaggactttataagaatgaccacagggccagaaactaaaaggtaaaatattaatagacctgactacataaaagtcacattgaaaaagacatcaaaaacaaagttaataggtaaatgatgaacttgaacaaaaaaattccagcagatgacatatttttctactatgtaaagagtttttacaaatgtctaagaatatcccaataacaataatggacacagcatatcaacaagaagacttaaaaatcaaaaaagaaggtcgggcacagtggctcacacctgtaatcccagcactttgggaggctgaggcgggcggatcacgaggtcaggagatcaagaccatcctggctaacacggtgaaaccccttttctactaaaaatacaaaaaattagccgggcgtggtggtgggcgcctgtagtcccagctactgggaggctgaggcaggagaatggcgtgaacccaggaggcggagcttgcagtgagccgagatcgtgccactgcactccagcctgggcgacagaatgagactccatttaaaaaaaaaaaatcaaaaaagaaaaatttcaagggccaaaaaccataagcactttcaacctaatcaaagaaatgcaaattaatataatgagatttctttttattatttttttttgagacagagttttgctctgtcacccaggctggagagccatggcactatttgggctcactgcaacctccgcctcctgggttcaagcgattctcctgcctcagcctcccgagtagctgggactacaggcgtgcaccaccatgcacacacgccctcctttttgttgtccttattcagttggaaaatattaaaaggattagtaatacccagtgttgatggtgtaaggaaaaatgcacctttgcatactgtttttggaaatgtaattggcaaaatcttttgggaggattatttgacattgtgtttccaactttttttttttttttgagatggagtcttgctctgttgcccaggcaagagtgcagtggtgcaatcttggctcactgcaatctccacctcctaggttcagcaattctcctgcctcagcctcccattggtcagtctgacctcaggtgatttacctgcctcggcctcccaaagtgctaggattactggcgtgagccaccatgcctggccctgtttctgacttttaaatgtgtctgttaacacagaaaaatctacttgtaggagatagtctttaatagttgccaaatacatttgtgttaaggatctttattgcagtattgtttgtagaaaaataaaaaatccaaatgacccaaactaaataatcacagtaaaatcattcaatgaatttattattttttttttcttgagacagggtctcactgtattttctgggcaggaatgcagtggtgcaatcatagctccctgcaacctccaattcctgggctcaggccatcctcccacctcagcctcttgagtagctgggactaacagatgcacaccaccacactccactaattttaattgtggtaaaatacatgaaacaaaatgttctgcccttttgacttcttgttcccagaggcacctccgcttatggttcttagtttacccacatctggaagtagaaaccctcttcttttccttagttgctcattggttccagtttacccttccacacgtgcctaaattggattaatcctcagtggttttggtggggtgtccagttgcgtatccttgaatcccccccatatcccttttccagtttgaactcagtaaatttgcccctggttgacttaaattgaaactggaacgtagctcattaagggagagagagagatctttaacacaggatattatcctggtggtatatcctggtggagaaagaaatgctatctttgaaaggatagtggcatcttcattttgtttctcctgttgtgtggtctgagtagtgttatctatttagttaatttctgctgatacaaattcttttctcacgctaagaatttttctcttcaagcgatctatttttttaaaaaaaaaaaccttttaaaatgcaaagtagccaagttgtgtccctgttgttaccaaatttccctttggggcatttccttctaggtagatgttggatattgatttaatgctttcggatctcctttgttagtggaaatcttatgcaacccctgatactttctatgtgctggtctagtagatcttatactcttctccagtatgaggttacagatggtttgtattgcatgcctgatgagcattcccaatattgaaagaaaacaaaagaaagcccaatttgtccgtgtattatgtgtttgcttgcaagggaggaggttaccataagcctaaaaatgatccctggctttgctaaacccttgatgctcttgacacggggtagctcagctcccaggacagcatcatctttttgttttttttttttttttgagacagagtctcgttctctcacccaggctgtagtgcagtggggtaatctcggctcactgcaagctccgcctcctgggttcaagtgattctcctgcctcagcctcccgagtagctgggactgcaggcgcccaccacccctccccaccccctggctaatttttgtatttttaatagaggtggggtttcaccatgttggccaggatggtctggatctcttgacctcatgatccacctgcttcggcctcccaaagtcctgggattataggcgtgagccaccatacctggctgacagcgtcatctttaagaggcaaaggatcacttgtttttgtagagccagagctatcagtggcctaaggagaagaaaaggcttgacatctcattggtagagaatcctctaagcatattatcaccagcaagagcgggtcagtactttacttgcatgatttgcagggctgttgttcacttctctattgaagttattctaagctcatcaaggaccttttagaaacagtgcttacattgtgtaatgtgaaatcccacctgccccatgccattagaccagagggagtatgatgtgaccattaaacatgctatgcgtatatcagaatatcacatgccccccataaataagtacacatataatctatcaatacagaaaaagtaaagccagtgttggatgctgatacggtttggattggcatccctgccaaatctcatgttgaaatgtaatccccagtgttggaggtggggcctggtgggaggtgattggatcatgggggtggatttctcatcagtggtttagcaccattcccgtggtgctgtcctcataacagtgagttcttgagagatctggttgtttagcagtgtgtggcttctcccctgtccccactctctctcttgctcctgctgtggccttgtgaggcatctgctcccccttcgccttctgccatgattgtaagcttccagaggcctcatcagaagctggacagatgcctggttcatgcttcctgtacagcctgcagaaccgtgagccaattaaacctcctgtctcaataaattacccagcctcaaatatttctttactgcactgcaagaatggcctaatacagaagcattccaaaaatgaaaataaaataaaataaatgcagatgatctctcactatagttctaacaaagtgaaggaatttggggttatggaaataagcatctgctttttgcctgtgtttttgacagaccctctgaggcagactgagttaattgtcatttgttgtgtggatgtaagtcagtaaaatgctagtatgacaagacaaacaaatactgactgagacccctgagacaggaagagatgtgttcctcaaaactggccactgactcagatttgggaagggacattcatgtgaacctgctctgttggcattggttttggctgtcaggatggaaagggtctggtgatggcagtcagcttgatgcatgccaaagaaaataggtgtttgccttgcattaaatgctgcttcaaggagaggatattagatagatttgatgctggtactgtcagttaaaagtgtaggtattgaatttttctaaatagatttcccccccttattccaaaaatggtagcaagattaacattttgtaggtactccattcctttgcaaataacttaaagaaattctcaaaatgtacagcaagagtttcaattttagctccctgttctctccccaaaaatacaaaactacctttcccactccttttataaagctgctggcattaaaaaaagaacaaggagaggatcctttaatgataagtactgagcaccaaatacattattgttttacatctggagttttagaaaagaaatgtacaaatgcaatccagccttgtaaagtgctttgtcaacatcactgccacgttgttcttgagatgccctggtataatagaaattgtacaggcaatttatcttcagcttgccatttttgtgtatgggtctgcaccctaaatatgggcatactctaccactctactgatgatattcttttcccccagttggtaacccagaagatagttaaaccatttcttgctcccccctacctatatttaataggaatatgcactgaatcatggtgagatattctggtgtagcttgctcagcatttgagaacacatcagctaataacccctgaaataccctccatagagcattttctgttggttaaaaacttgcaagcaagaatggttaaagtacagatgttttctctgaggcttcgtatctcctaaaaagacacaggttattctgacaggtgagacaagcccaggcaaatatgcaacattgatctaatcagcaagaacaagagtgatgttttaactggggctaccttttaccagcgtcattaaaggctcccattactcttttattagaggttccctctcttccttatcagattacagaatgaacataactcatggcagtgatttgatctcttgttaaagaggattacagctttgcattaactcggattgacatagtttataatttgcttgttgattctcaggtgggtagcaccacacgtttgaccccccagcagtgctgaggggaaaggacccgcatatatcatcattaaggatggcgtccagcacagagataggggcatggggccttctttcgccagtaatgtcagaaaggacaaaggaaacactctcaagttcaaacctaaggcttgggccagagttttaaaactgggttggaaaaaaaacactgctgttgtttcttctatttttcctgatttgctgctgttcagtctcttattctagagaacttgcattgtcaaaatgaagccttggctccaagcaggaggtagagtgataaaagcacatcttctagaaagagatttgtagatgctgaacagataaatccttcctcaaaatgggcctttttgactatagttctcatttctgcacttatattctcatcgcttcttcaaaggattgtaaatcctctttttttcccaaagggatgtttcacattctttaaagtgtgtgtaaatgtttctcttaaggacttgttttttaatttttattattattggctttctaaatatattgcaatatcttacagatattgtattaatcacagctaagtaactggcaagttacttgcaagccggtaggcaatagctaagtttttcaccttaatttagttagtcataatcatgttattgatgtgccccacagtgatcactgagccaacagtcgattgctgagataccatttctgtttctaagtgcagttatccttcgctctgatttatccactgtaagtctgtcccctgtgtctgatgggcaatgaaataatatagaataatcatatcatatttcacttactgagagtttactatatgccagacattgcactaagcccttcacatatattttcatttgttcctcatttaaaaaaaaaacagtgattgatgttatctgcattttataagaatactaaggcatggaacaattaaataacttgcctaagctgaacagcaagtaagtagtggaacaggtgtgtgcatctaagagtgtggtcccaacccccactgctgttgccaagaaattcacaaacttttagaaatatttgggaatcatgtgccacagggaaggcccccatccccacccctagctactctttcaaaaacttatttgggggggggaacttctttagattaaaatgcttccccccccacgctttcttttataggagagatgctttctatacaggaaggttttgcctgtcagtcattcatattttagtgtgaatcactggattcccaaacctggttttatgttatatcattctggttacaaagaccttagacctcataattagctttgaatcctgatctggtatatttagtcagtttatgcatgtaattctattctctgccatagtcaggcacctatcacctacttttcttagagacagtatctttttcctgtataataaaaatagtgcatgcttatggaagaaaatttgaaaaatatagaaaggacaaagaaaaatttgtcatcctgctattgagggtagaacattattaatacttttacatgttttcttatagaattttttgtgtatgtattttatacagatatatacgtatgtgtttgaatcttttttcagattaacttataagcattttaatgccttaagtatttttaaaagcattttaataacctaataatctattatggaatatgtattattgttggacatttaggttgtttgtagttgcctttcttttcaagtagtgctgcagtgaacatatatatacagaaatctatgttctaggttttgctgtgtctttagaatagatttctgggtcaaatatctaaactttctaatgactcttgatgagttttactaagttacatgactcttttctttccagctgaggcttatgtcattttatctttgctaagctggagagctcttttttctttttctttttttttgagacggagtcttgccctgtcgcccaggctgaagtgcaatggtgcaatctcggctcactgcaatgtccgcctcccgggttcaagtgattctcctgcctcagcctcccaagtagatgggactacaggcgtgtcctattacacccggctaattttgtatttttagtagagacggggtattgccatgttggccaggctggtcgcgaactcctgacctcaggtgatccacccacctcagcctcccagagtgctgggattacaggtgtgagccaccacacccggccgggagagccatcttttaaaaaatatttcctatttagatataaaagttacttactgtttttaagttcataacaaatgacaccttattgaggacatataatatggtaggcagtgggctataatctaatgtttattttctcttataatagtaaatttgaagagtattaatcatgtatttctatcatttgtagttgtttttatcctttgcccattttctttttgagttttgacttttctttatgaattttcttcctgtatgaattctctatattatggctatatttatggttatataacatttcctggtttttgtagatttccatattttgcttacctgtcaatattaatgatttttattggttacatagaagttttactttttaacctgattaaatatataagaacctttttgtggggggtgtttttcattgttttatgattaggcaatctctcctgtatcccagaacaattattcacctatattttatttaatttcatctgaattttttttcttttaatctacttgggagcattattttaatatattattcaatgatcttcactttttatttctactgcctctttttttgagtccaggtctttttttttgtttttttctttttttaacaaaagacaaggttttactctgttgcccaggctggagtacagtagcccaattatagctcactgcagcctcgaactcctgtgctctagtgattctcctgctgcagcctcccaagtagctgggactacaggcacacactaccacacccagctttttttttttttttttcctgtagagacggggtcttgctgtgttgccccagctggtcttgaactcctggactcaagcagtcctcccaccttggcctcccaaagtgctaggattacagacatgagccaccactgcacctggccttttaattttttctttcttttttttttttttttctttttgagacggagtcttgctctgtcacccaggctggagtgcagtggtaccatctcggctcattgcaagctcctcctcccgggttcacgccattcttctgcctcagcttcccgagtagctggaactacaggcacccactaccacgcctggctaattttttgtatttttagtagagatggggtttcactgtgttagccaggatggtctcgatctcttgacctcatgatctgcccacctcggcctcccaaagtgctgggattacaggtgtgagccaccgcgcctggcaaatttttttttttttaattcccacatcgactattacactaacggcatattaaccaatagtctgtattctcatcagttctgtttcattgccagattcaccttcctccaatatcacatgctactctttgcctctagcataaaacccagactctcaagcctgccagtcaaggccatcgatgacttgttgccttgctacttttctctccttatcgcctatttcaccccatgtgctgtccagagcagacacctgcaatccctgggacacactccctattctgcatgtctgttcattctgctcatagcctgcagcatctcccacccccgtctcactgttgtttcctgttgaaatattcagtcatgaggtcaccagcctttctagggagacttcagattctccacccccactgagctttcttctttgaacccattctgtttgttcctcccaaacagttaaactgttaactgtataacagttcacagacacacttattgggggcttttttcttgctaagtatgttaacttaaaagtcaaagaagtatgcctgtgtgtactgtaatcttgtatttggtattatcgagattttatgttcatatatttggaataatatattttaatttcaattgtagtatttgcaaaacacttcacttaaggtctttttccagttattgtcggcctcctctgagctcagcgctgactcagtattcctgagcaccttatgccctcgctcgtatgcagtgccaccctgggaagccttctttatgggccatggtttctttcttttacatagtgaaaacaggcctcttgttcactggattcttgagaataaaatgttctttttaattttttaatttctgagaaggactattttaaatgtaacccctaacagataattatttaaataaacaaactttgtgttttcacatctgtgtattacgccactgtccctcagcatgcaatacagacatagccatttctgtgcaaaccccaaaaaaagttgggtagaggcttcctgtctgagatgcttttaaaggcccccagcttgtatgtttgtttacagtttgctgtttacaagattatttttgcaactgtcctataagatgaagatgagtttcttgcctcttttgctgaaatctctccaaatcatctcacttctttaatatactttcctctgcttccatgtcactttgtatagatccatattatgtatagcatctaccaccaggttgtttcctaattattcataggttaggtctccatgctaaaccattgcaccgcttgagggccggctccttattttgttcttagctcatggcaatgttggaaaagacccagaatgaaaggttctcctctgggacttctgattccccaccctttgcttagagggtttttggggtcatttttacttaggattgaaccctgggaaaggctctctcaagaacactcttacatgtccatcacttccaagaccctaaactttgtatacactataggttttctcctgctatatactatatactataggtttctcctgctatatactatatactataggttttctgtgctatttaaaccaggtttggttctgatggccttcctataaattattacaggtcaagtgtcacctatcgaattcttgcgtccagaggaatttcgtatttcagattttcttggatttggaaatatttgtattatccccgttgagcatgcctaatctgaaaatctgaaatctgaagtgctccagtgagcattttcttacagcatagttcgtgtcggtgctcaaaaagttttagatttcggagcatttcagatttcagatacttgagttagagatactcaccatgcagttactatggagcatgaagaaccccagcagggctctgtagtgatttatagctttcggtcagtgttctggactctgctttcaggatttttctttaagaagaaaacagttctggaatggattctgtaagtgcattaacaaagcataaaggcctggctgctttgttatttttagtgttggtattaagtgtcaagctaagaaaggatatttagatcgaggaccttacctcgttagacttggagttcaagttgctggcagcacctggtcatgggaagctctcaccagccaccctcagaaatgaggtcctgaatgagccataaccacaccctatgctttaccactgtctccctggggagcagaacactttataaacattaattctttgaccccctgggcacctccacttacgtggtaaataagactgaaggcctttcttctacaatatagatgaggaaacatcagcccagaagggaaattacttgatgagagacaggtgagcagccatgggccccagggtgtttggagtctcagtagctgacctgcagcagcactcgtggctgccgacacccaggagacacagtcctgttccgttcccctttctgcttctcagagggtagtgggggttgggccttttgtctcttgtatggaatgtgaaatgctgcaaagacgagcaattgttcttcaatgctttgtcctcccctataagaaagaagaaatcaatacacattttctcatacacacacttggcagcactctgccttctcttccacagctcggtcctacagggggaaacacaactgtacagccagacagactcttcaggttcaggggaagaaatgcaaactgctcactttgcacttagcagtcaggctttttagagccaatcgtataactggctgaggtaatcaaactgctgacctcagagactagctggtgaaacgagtgggagagatgccctgttgcaggccccctgttgcaggcctgctcagtgctgctggggaaagctcacctggcaggtgtttaggacagatgctccttttgctgaatttctgatttgcagaggcaggaaggaagttctttgaaggatactattaaaaaccaaaaaattatggacagattgagagcagccttttttttttaatcaattaataggcatacagtctgaacaagagccccatctcagactggattttattttttcatcagaaaatgtggtatcgatatctgtaattttgtcttacagctcactgccattaaacagttgtgtgggatgtgaataaaaaagaatttgctgccattgttaggagaaatggtagcttgggtgtcagaagagccttgcaaggcaggagatgagtttagggggagggcaggggagcggggactcgggctctggggtccttcacgcggaggagaccattagaccattagagtgtgtgtaggatcaccaggggagggtgtcaaaagaagagaggaagccaagagcagaacctgggagaaggaaggcagaggagagccaggagaacacatgctccttgaacgctcggggggagacttccgggtagggcagctggccagcagctggaagggcttgctccccaggccccagcggttcctctgtgtcccctgactcgcattgcagagctggcactttgcatttgctcacttactagttacttcttgtgcgttttgattggtacccgatttctaagcaaaagaaatcctccaacttattaccagaagtaatagcagagtgccttgccaaaactctatgggttgacattgaataccctcactaattcctgcgtgttgaagttaagctagagctgagcgatgcatcctgtgctcccccaacacacacacacacacacacacacacacacacacacacacgcatgcacacacgccctgggttgttgggcagcatcctgatacggatacaaatgtaactggaatgtcagtctcaccttctgtgcggctgggggaagtgattcacgtctaagcagtgaagcatcccctagcttttaacaggagctgttagaggggctgctgtttgaacaaggagcttcatcttcctgaagccagcagtcacaaaaccgtaaacacaacactggccaactctattgcggggaccgtggtggcttgacgttaatattaaacatctccagcaaggcagagagctctgcatcccaggtccggaataaaaataaataaaaataaagagaaaccctgctaaaagcagtgtgatgatttgtcgtctttcctttgtgaggccatttgtcttctctcacatcaaatctgttataaaacagtcaaactgtgaaagtggacatcatcccgggaatatggaatattaatgcgtggaaggagcggcgccccttttgtctgaagagtggctcctcccccacccctctgcttttttgcaagtccgctaaggtaaattatttttctttaaaatcatgtggaagatttgaagctagtagtagggatggtggaagttttgagtatttttcttcctttgttaaagtgcaggggatttgtgactggcttgagtaaggaggaagcacaagtgagaagaaaacctgtccacgtgcagtccccttctcgcccccatccctctcccctctcctccctgttccccagcctctcagttcctttgtttggggcctgaacctgcttcttggaacatttataaatcttgagtctgtctgatctttaggggacaggccagaggccgtgtgtcaccatgtgtaatttagagctgtagggctaaaagcttttccagaggtttgaaggacctagttctgacctgaccaaaagaacgaattggaacagaccttctagagtctccttcaagcactggggaggatggtgatgagagcagacacacggggtaatttatgggctccgctgactggtggctgggtccacttggaaacgagtcgtgtactgccaccttgtggcagattcgggcggctgcggttttgttgttttggaaccttgtgaagagtttcagctagtgtcggattggacatgatttgccttgtatctagatttaggtaattagtgatagataaggggtgtctctgagtcattcttattttgctaagttgatcctgttaagaaataagtcttagctgaaagaagactgctttctttcccctttacctcctttcttctgctttgtggtttttttatgggggtttttgttgttgttcagttttggtttgttttttggtatggaattatgatgagatttcaggagagaagcctgtgatcctccttgggttgttgggggatgttaagaggagagtgagggagagtaagtaccgactttttggccgtattcagaaatcctaagttttctactatagtgatttttgtgtcattctgactaaatactaactccttatcagcactgtgtctttttacttggattactttcccagcaatccagccttcttggggagctaagtttttcttttcttttttttttttttttttttttttttagatggagtctcactcttttgcccaggctggagtgcaatggcacaatctcggctcactgcaacctccgcctcccaggttcaagtgattttcccggctcagcctcccaagtacctgggattacaggcacacaccaccacgcccagctattttttgtatttttagtagagacgaggtttctccatgttggccatgctggtctcaaacccctaacctcaggtgatccgcccaccttggcctcccaaagttctgggattacaggtgtgagccactgcgcccagccttgaggagctaagttctaatgcatgtcacctgtgtctgagcccattcccgtgacatacatagggctgcccctaccacacagccccaaagagcacagggcgattgcctgccatttggatcagtatgtttctccttttaggtcatagagacacttctcaaatatctttctctcatttgtaaagtcactgataccgagtaggatgaatttgggtcggggaaagcaaaggaatgatgaaaggagggtgccatttagtccctcgtgttggttgggagcaactgtaatgcatgcacacaggtcctcagcatgttgctctgtctcattccatttctcatgatcatagatgacgatgccatttatgcaatgcggactttgcttagtgctgtaaaaacagtatgtttaaggaagatattgtcaccatcttactgatgaggaagctaagattcagggggctaagtaatttacctaaggtcctagacccagtaaggacctgagccagtcagaaccaactctgacagcaccttccagcccctctgcatttgtgataccatgctctatgccatataaaagcattcgccttgttctatttaactattcaagatttctattaagctggtttctctaagtatataagaaaagaaagctgctgtccaagccgggcgcggtggctcacgcctgtaatcccagcactttgggaggccgaggcgggcagatcacgaggtcaggagatcgagaccatcctggctaacacagtgaaaccctgtgtgtactaaaaatacaaaaaaaagttagccaggcgtggtggcgggcacctgtagtcccaggtactcgggaagctgaggcaggagaatggcgtgaacctgggaggcggagcttgcagcaagccgagatggcgccactgcactccagcctgggtgacagagcgagactccgtctcaaaaaaaaaaaaaaaaagggaaagctgctgtcctgtggtctgtagacatttttaagaggaaaatggaggagtgagtagcctttgccctttggcctactttggtttctggcaatcagaatggaggcacgtgctttattggagaaggatccctttgtttggtgccgttagcatgtgccaagtgataattggcaagacatctttttccgcagacatttgggaggccctgggcatactgatagatagaacagaagagagtggaggccttgggaagacagagagagaagtatgtgttcagagtgcaggagagatggagtcctgctccacctgctttgggctcacgagggctgcgggttctggagaccttgcttttggagctttggcaaatggagggctcataggagtgcagtcaggatggcaagcagactcggtcacaggaggaatggaggcaactgaggccgctgaacccggaaaagaacagatttagttagaagaagacatcaaatagttgaagtgctgccacagggaatagtagtcagccttacttctctctggctttagagggacaagagcccatggctgtaagtcctaaaatgacagaattgggttcagcaggaggaagaatgtttgtgtgtctccccaaatggagtggtttgtctgagacacacttactgcatgtattcaccttcccgatctagcttctgctgtgcctttcatgtctttgtgaacctccacaaaatctaacaaagttcaaataagcattcaaatatttttaattaattgattatacctgtagtatgttaggttttgaggccaggaatcatatacatctagtacatgtttaagcttccaccacactaagcaaattgttttcaaagacaaacgtgaaaaaaggcagcatcagtacatcaccaataattttaaaagcacacatctgtcattggtgaccgcgctggtctgtgcagagcaggcgtgtgtgtgaatctctgtgctgactgaccatatctgggcagactctacttgtagggtttcagatcggatccagaccctgctagccgtgagtgctgctatgattggaaccctttgtccgacttgcctgccgtgtgctttcttcttttcccttgattctgcaatgtatgtatgggattgagttaaggcagaagcaaatgctacagcacttttgtgtgcagtgtgggagaggtagaggattagaaaggaaggaagggccatgacattctgggatgtgtcttatgtatttagggagaccccccactcctaagaagcaacaaatgaacaatttttaattagtcaaaggcaaattatgtgtatcattttatgtatttatttatttttaatagagacagggtctcactgtgttgctcaggctggtctcaaactcctgggctcaagtggtcttcccacctcaacctcccaaagtgctgggattacatgagccaccatacctggcctatgagtcacttttcgtctggaaagcagcagcattgtctccgccagctcctttggaagactggcacataatacttgctcggagaccatgatgcgctttgggaggctgcacaggctttttcggggagcagtggaatggctgtgttctctctgctgtccacctgtctttgtgggtaggtacagctcagggatgtcttggaggcctgggggttccagggccagtgtaggaggagtgtggttttctgtagagtggatggtacaattccttcagaatccccagtgctgcaagctactgacctagcaaattgaaagccccacacagattatttgcaggtttaatatgctcctttgtactgtttgcccaagtgacatcgtgaaagacagtgatctgtattgtggtggggtgagtgcacatgtggaactgaaaggaacatatttgggtccacacatcggtgaggggctgcattctcatacacatacacccccatttcactcagagcttttaaaaccttacctgccactcaagtgattgcagttcacagctagctacaatgtgcatactttaagtctcttcagaagaatcacataataaataagccgaatcctaagacagacagacagacagacagacacacacacacacacacacacacacacacacgcacattctgtctttatggaaaatggcggctaatccatgatcatttttttttctagaaacaggttttaagataatatagtaaaaatattaaattagaaaatgcctcactaagggttataaaaccttactgcactagagataggtaattatcccctctacagcttaatgacagtttaaaagaaataaaaatgttagtgctcattacttgcttttgtagtttgcaataaagggtaagttaaattttaattcaaggaagagcccctgctatcgaccttctacctcaggtccaagtcctgttaattactccgcaggctgctcccctgcatgataccagcatgaacgcattgtctacagtggacactcccactgaccatgagtgtgtgtgtgctggggggtgggggtattacagatcagtgatttgcatcttgattcttaatgtgatggggagcaggaattatgtgtttttttaaaaagttgattatgcatagccttaaggggacctcaggtatgaaactacacacttaccctggagaatctgatggaacaaggttaacctggaggattgatagtttagcttctccacatggctaaatcccagttaggaagatgcagccggggggaaatgtttatgcagtggaaggcggtctggccctctgtccagtggcacctttttgtagcctcgtctttacttgcagtttttcttgggatggggtaagggctgtggacatgttttgtttcttttcagatgtctttgcctttccctaagcacctagacacctgcctaggtttgagggaggaagagctcagtgcaccctgtggctcagtcttcacactggggtatgcagagactttccaaggggaaggtagacacagatagtcaaggagtcagtcttcagacgtacgctctttcctaaagctgtctgccccagagcaggcctgtgctggagggctaggttgtccttttaccctcgtccttctctggccttgaaaagcctccctcgagcccctccttaaagtgacatggacctcgggctgccacaggaaaacctccagggcctcaaacccaaggacagctggaaatatgggtacagagattgagaaagcaaacgcctaaggactagaggacaagccctgtgcaggccgggtggtttctgggtcttcacttccagcagaatcgctggagaacacgagttgaattgagttggcagttggttgaccgttaggactaatgtttggggacgagtcactgtgcgattttttgtgtgtgctgtataattcagaaagagcaaaaagaatcaagtggcattgctatgccagaactctgtcattcctatctgcttgtttatatgacaacatttctcagtgcttatgtctacaaaaaacaaaaaaataggagtagaattgatgctgaaccctccttcattctggcaataaataatattcctccatggatccatgaacaaatggagggaaaagcctcatccatatcattaagggatgcatttctaataacattttacacatgtatgaatactaaattttcactaaaattaggatatattatatcatattattatatattgattatatcctaataataatccagaggaacatttttaaactacttagagccttataatgtcaaacaattaaaatattttcatttcaattttttgaattttaaaaatttcaaaagtgcttttatttacagactaatgtggccaagaagtatgataagggtgattgataaaagacattcaagcatgaaaccattatattaggacaaaactctgtagggaaaagtcaggtggaaataaaatttaaaaagaaaaaggtgctataaaatgtccaagttaaaaagtttatgtgtggcccacgcctgtaatcccagcactttgggaggccaagacgggcagatcatgaggtcaagagatggagaccatcctggccaacatggtaaaaccccgtctctactaaaaataaaaaattagccgggcgtggtggtgcgcacctgcagtcccaattacttggaaggctgaggcaggagaatcgattgaacccgggaggcggaggttgcagtgagccgagattgcgccactgcactccagcctggcgacagagcgagactccatctcaaaaaaaaatagtttatgtgttacttgaatgaacgatgagtatcaaatcattatggcatgtaggttccattgcaggcattacaaaagttaattttcacaacatcctggtcattatatattttgtaactatttaaacttactgtgaaaaacgttataaaaatgtgcaaccctaccttctccaacctagtaaagagggaggaagggctgtgcctccctgtaccacccagctgctcagggcaggagccaaagccaggacctggaaagaggaagggctgaggccaagctgaaccgctggaatctacagtgggggtggctggtggggggcgtgtggggcggggatcttcatccccatgctgctcctgggccccagggagggtctgctttgtctgtctcagagaagggagtggaagagtcagccaggaggttgttgctgtgtgcttcatgagaaacggtgagatctgacctagtggaagcctggaggagctgtgaagtttgagatgctttgaaggtaaaaacggtcaccagctggtgatagtgggtgaggaagatgtaaaagttgaaattgcttggggacttttagattgaaataatcccctattgatattctctctctctgaaaatattttaagaacccagaccactcagcttcccaggttgctttgccatgaacagctgcatatgtttgtcagctttgcccacctgagtgtgaaatgatgttctatgaaaacatgggtttcagcatttcactctctgctcctgacacgtgaaccctgctgcggacagtaactgctgccttcggcccaggcgttgcactgatattgcgcgcagagtggaagcatttgctcagtggtaatgatggggtctggtgcaggcaagcgcggcgaggctggaaagggtatgatgtgaagggctagcctcgcgcctctgcatttctttctcatcagacgttgttgtcctaaagtcacactgtccttttgttatggcaactctccctttcacgccatttaattttttgtgtggaaacagctagagagacttgtctttactggcaaataggcaggccatggtgtgatgaagtggagcctgccctgggcaccgaagtatccgtgtgacggagctgctgatttggaagccgtgggtttgcatttggtctggggctgccgtccaccttggcaggcttcgtctgggctgattgaggctagtcacatggatgtgtgtaacagaagagcagaagagatgggtggagccaagggggaagctgtgtcctttgtctgtggcctaggggtctgctgggtagttcagggtgaaggcaccagcacattcttgggataaaattcctgtaataaaattggaggcctgttgttttctggcctgcactttcactgcctgtccctcccgcggtccccaacatgataaggctagcttacatttgtggcttctgtagttcttccttaagatgtttttcttttgacttttttaaagctttgatactctattccttttgttggatttcctaattgtagtacctttattcctatccataactatagtagggtgacttcaaaaaaagaccagtagttttttgtgttgaagccttgctgtttgaaaggtggggttttttggttttgcttttaaagtctgatgtgccgatgctgaccctcagatgatgagagcacttttaaaacaagacggcaggctggaatttgagttccatcttgagaatatccgagcaggtgtagatttcttctggggctcctggcccatgacctcagccctgtgtgcgcctgccctgtctctgtgagggctaccggctgggccttctgcagggcgtggacatggatggctgcctctgcggccacgtgctacacgcccacctccctgatgacagggacgtcctcacacgggtcttgcctgcttggaacctcatgggtccctcatgtctctgcagggaggatctgctctgtatccacaggggaaagtgttctggagcttctgtctcaacgataggaaagatccctgccccacccacaccccttttaggttttccaggccttgacacatggctttggccgatgtttgtgtgtatgttgcatttaaaagagtttgaaagtggtcatttacttttctttttaggggcccaagaccctggcatgttattgttttaatgtcaaaacccaactttagaaataaattagccaatcatattatttattagactgagaatagagacagggcagctggggagtgtggaagaagcttggttctcttcctgaacaactgcacagatgatagtaattggaatcgtgttgctggctcattttcattgtttttcaagtactgccaagtccaagaaaatgtatgaaaactaaattatatccccctacatcccatgtctgattgaatcctcctcatcggatggcggtctcctacatcctattaaaatattcaatcttgttttcttacttgaagagcctgtctgcaaagggcaaacttacagaacactcattccctggagacgggtgtccagccgcactggaccatttacatattttactgtttgattgggtttcttccttctgttgtatttgtgagtaagagctgtggggtgcatttttaattacatggctgtgttttcaacagaagaaacagaatggggtattttccagcttctgcgttcctttttaaccttgaatagtgaaccagtgtgttaaccagtttgctgtgtttgtcttttaggacagaactgtaccgctctctttttggccagctccaccctcccgacgaaggccacggggattgacatcgcccacctccgacacccagtgggcgccttggctggtgcggctgctggtccagatggaggaaaccagtgactttatggggctgagctagtagggaagcccctggaaagatgctgcgttccgaacctgtgcctaatacacgcaagggcgctgtcccgcccaaccccgcctttaaacgccacaaataaagagcattgttaccgccaccaccgcttgtgatttcttaagaggctgagagtcagtctggtttggttctagtggatgacacatttactgagcttttttttttctagtccagtggcctcctcatacaatgtcagacttgacgtttccttgacccactcaccctggcggacatgtagattgtttgcatagcgtggctgttgtgggtgaaatgaacgtgggagtgcaggtgtcccttcaacacagtaatgtccgttgatctgtatatatacccagaaatgggattgcttgatcgtaggatagttgaatttttagtttttttagtaactccttacagttttccataatggctgtaccagtccacgttcaccccggcagcgtgccagagctcccttttccgcgtctttaccaacacttgttaactttcatcttttttaaaaaaagtttttattgccatataatagttgtatacattttaggggttcatctttttgatagtagccattataacaggtctgaggtgatgtctcattgtggttttttttttcttttatctttttttttttttttttttttttttgagactgagtcttgctctgtctcccgagctgcagtgtagcggcacaatctcggctcactgcaacctccacctcccaggttcaagcaattctcctgcctcagcctcctgagtagctgggattacaggtgctcgccaccatgcccagctaatttttgtatttttagtagagacggggtttcaccatattggccaggctggtcttgaactgctgaccttgtgatctgcccacctcgtactcccaaaatgctgggaatacaggcatgagccaccacgcccggcctcgttgtggtttttctgtgcatttccctaatgattagtggggctgataattttttaataagcctgttggccatttgtatgtcttcttttgagaaatatctgttcagattctttgcccatttttgaaatgggttatttgttttcttgcttttgggtttcttacatggataaggggtattcagccttagaaagaaggaaattctgacactcgcgacaatgtggttgaactggaagacattatgccgagtgaaatgactcaagcacagaaggacagagaccccctgatctcaattatacgtggaatctacaaaaggccaactcatggaactaaagagtagaatggtggttaccggaggctgaggggggtgggggagcagggaatgcgacatgttggtcaaagactacagtttcacgtcagaggaagtatttgtttatgtatgtatttatttatttatttatttatttagagatggagtgcagtggcacaatcttggctcactgcaacctccgcctcccagattcaagcagttcttctgactcagcctcccaagtagctgggattacaggcccctgccaacacgcccagctgatttttttttttttttttagtagagatggggtttcaccatattgcccaggctagcttcgaactcctgacctcaagtgatccgcccacctcggtctcccaaagtgctgggattacaggcttgacccaccgttcccagccagaggaggaagttttgagatctgttatacagcagggtgactatagtcaataatgtatttttcagagtaactcagtaaatttcaaatgtttcaccataaaaaatgataagtgaggtgatggatacatggacaggcttgatttaatcgttctacgttgtatatacactatcaagacatcacattataccttataggtggatacaattatgtttgtcaatttaaactattaattttaaaaacacttaagaccaggcgcttctgctcatgcctgtaatcccagcactttgggaggccgaggtgggtggatcacttgaggttgagaccagcctggccaacatggtgaaacccagtctccactaaaaatacaaaaatcagccgggtgtagtggcatgtgcctgtaatcccagctacttgggaggctaaggcaggagaatcgcttcaacccgggaggtggaggttgccgtgagccaagatcacgccactgcactccagcctgggtgacagagtgagactccttctggaaaaaaacaaacaaacaaacaaaaaacacttaaaaggaatgatgctgggataggatgcttctttcttttaatttttttaaaaaaaggtttcagctactctgggcacactctgcctgtgggggtacccctgctctgcaaggagcagtttaaaaaaataaatttaaaagggttttcttttgtgtgtatgtgagagacagggtcttgctctgtctcccaggctcgagtgcagtggtgtgatctgtgatcatagctcgctgcagcctctacctcccaggctcaagcaatcccctcccacctcagcctctcaggtagctgggactacaggtgtgtgccaccacacctggccaggatgctgctgagtggataatgtttagtggtttatcacagctctgaggagcagagactcccccaaaaacctaggggactttgtaatttggaggcatttgcctgttgtcacaaatacacggttgtttgactttttttgtctcctcttttcacctataaagattcttccagagtccttttccatgctcaccattcctaaatcactattgatattagctctggtgtaaatctggcaggagacaattcacttgtttttcatccaaaggtcaaaagctggaaattaaatccccataaggggaatttattggcttgctgtggtcaatatgcagtgaagattatcttgcataagtaatgtgcgcatatgggtggccagcatgctggcctgagcatctcataggtcctttgcccagctctttatttagagctatgggattagagaaggcattttggatccaggcaactgagttgagttgtagttactataactacttgtttgtttgttttttgagacagagttttgctctgtcacccaagctggagtgcagtggtacaatcctggctcactgtaacttccacctcccgggttcaagcgagtctctcatgccttagtcttccaagtagctgggattataggctcgtgccaccatgcctggctaatttttgtatttttagtagagatggggttttaccatgttggccaggctagtctcgaactcctgacctcaagtgatctgctggcctcagcctcccaaagtgctgggattacaggcgtaagccactgcgcctggccctaactacttgctttcaaagttgagttttgatattgctttgaaatgtcaaaaccaagggacagatttttgtccccaggaatcctctatatcattgccttggtgtcagggacagccgcacagtgccttcggctggactgcagaagaagcgaggcctgacgtcatctgcatcacagttgagttttaacataaatgaaactgctgagctcaggatggggcagataggagggaggagggtttttccatctcatattaattggaccttggtatgcagtggcttttcttgtctctacaatcacctctttggcttgactgtcagggaaatgtttacttttcaatgtgtctccagttaccaaaaaactcaaccgaaataggagagttcccgcacattcactgctttcaaaatgatccccttttaaaatacagaacatccaacgttgtccatctagccgtgagggttctggatgatgcttggtaggacggcaaggaaatgacctcttagtactgaggtttctatgagcctgacgccaacccgagtttcctaaacagaacctttgtcatcgttactctgatgaagaaaaagatttaaacatgcccttcaaaatatttggagtccagcaagtttaattaaaatgagttaaaaatgagagctgagaaagaaggaactgacagaactttcactgaagggaggctttgcatttaaaattcagaaggtcaccctccttccagccaagaataaattggaaactattttaattgacacggatactgcaattcaactgttactagaaagattagttgattgatttgcattttaataaaactaatactttacattttggtagctaatgctgactttcaaatgagttgagaacagttatcaagagtttcaatccagagccctttttcagtgttgactgaagcattcctctcttttgtgtggagtttgcgtttattttatttttgcccagctgactgcttcacacgagacactcataaaccatagaccttaaagatctcaccagtacggcaaggcggtgagctggtcacgctgaaacgtggctgcagccacagctccaccctgcccaggtgtgcaccagagatctgggaaagagggcagagggcctcccttcagggtagaggaaatgctaaggctggctttttgtcttatttatttttgagacaggttcttgctctgtcacccaggctggagtgcagtggtgcaatctcgcctcactgcagctttgacctcctgggctcaggtaatccttccacctcagcctcctgagtagctggggccacaggcacgcaccaccatgctggctagtttttgtgttttttgtatggacggggttttgccatgttgcccaggctggtctcgaactcctgaactcaagtgatctgcccacctcggcctcccaaagtgctgggattacaggcgtgcgccaccacacccggccccacttgtcatctttagtaatttggggtcctcttctgtgtctagaaacaatcatacagaatagccctggtgattctcagcaggggaggagccagggagcagtttgcaggggaagacttggtttttacttctagactgtttgatattttttacttatccttaaaaacaaaatcctcatgcagccatgtctgccacccccctgcacacatgtatgccagctgagaagcatggtgcacagtgatctgcattttaatagctcagtcagatgatttccatgttttcgcagatgtcacactttcattactaactagtcattccatttggggcccgtatcaatatttcaccaaatcccctgtttggggacatttacattgtttctaggtttttgctcttaatatacaggataatagtagaggagaatatttgtgcatcaagcttgtttattgtggtttttgagacttttgttttccttggtgtatatctttaggagtaaaaggaatcaagtgaaagagtctgtgtgtttttagggctcttggaacatcgtggtggcgtcagggccctcgtccacccccacttgcctaggccaggccatctgtaacacagggcgtggaggagccaggaggacactagccctggaatttgatcctgggatttatttcttgctccccagggaccccttcaaatcatcatgctcctctgggaggattaaagagctgcttcctataatgtgctttgaaatgatgctccaatgaaagatggtggataaacagaaagtgacaccatcgtctccctcccaggcgcccgtattttttcctggctgctggatcgcatataatctgctctccacgtgcccctcttgttttcatgctcttgctactttcggagccttcaccctggggtctcccaggcaggttttccttgtcctctagacttttggtgtgcagccatttctctccaggaatgctggctagggctccctattgaacatcatttggaacccctgggcgtgtgagaagacacgggaaagccagcccccccgctcactccagcaactgactctgcattgccagcttagggatgcagtttcctttttagaagttgatttcctgctctccacatgcattgctaaaacccctccaacgtgactgcctctctcagtcttaccatttaatccaaagagagcagagtttgaggcttagaatgaatccaaatatgatgttggtcataaaggtttgtaccattccccaggaatgaagcagtcactctgtacatggaatgtgttaatgccaagatccacgtctccccggatccagacgcacaaatgaggtaggtgcgtgcctcagcacaactgtgcaggtgggtggaggtgaagggtgtcagggaagggcccaaggctgggtgcaaaagcatgggtgttttatgcctgggccactgcctgcccctctggtgacatcagaaccgtgccactttctatccttgctgttctgttgcccgtgtttaataaacacagacacaacagtgagcctggcctaaaatgaatgaactttgtttcctgcacctcagtttgtgtttttacttttttgttgttgttattgttttgagtcagagtctcactctgttgcccaggctgcagtggcgtgatcttggctcactgcaacctccacttcccaggttcaagtgattctcgtgcctcagcctcccgagtagatggaattacaggcatgcgccaccacgcctgactaattttgtatttttagtagagatggggttttaccacgttggccaggctgtccttgaactcctgacctcaggtgatccgcctgcctcggcctcctgtgtttttaatttttatgtatgtggctgggcacagcagctcatgcctgtaatctcaacacttttgggaggctaaggtgggaggatcacttgagtccaggagttcgacctcgagatcagcctgggcaacaaagtgagacccccctctctacaaaaaatagaaaaaaattagccaggtttgagctaattgatggtgtgcacctgtagtcccagctactcaggaggctgaggtgggaggatcacttgagcccaggaggtcagggctacagtgagcatgattgtgccactgcactccagcctgggcaacagagtgagaccctatctcaaaaaataataataaatgtatgtatgtgcatgtgtatcggggcattgtactagaaattaaataaagcttgccttcatgaagagaaccattctccttttaagtttacttcttttactttcttttctctttcttcataacatttaaaaaataattgccagaaatttggtaagttcattaactaattctctcaagtccaggctgcacatcaccctgctgattcgtgtggattcaatttgtccaacagttctatcgatgaagtcctcattatccgctcctcgtgtgtggatgggaggaaggttgtaaatgcagcctgagtgcaccttatctaacttttgtttttctcgtagatctatagatttcctttacggtgcctttcttgcccatcatgtggggtctgccaataggatcgttgcctcaactgcatttatattcctgagaagtttactccatttatttcccctggttccgggttcttggagttcatttgttgaggtcaaggacaccatgttctcaggaaagaaaattttaaagaacgtggaaaaaaaaaaaagcaacagctgcacatcactgatcgggtagaaaaagaatataaggatctcaataggcatccggacggtaacacatgaagactcctgctcacccctcccccacatctgcctctctacgactgggttggaaatgagctccatgtgtgctgggcaggcaggttcctggcaccggcagctggccgcttctcttttctgcgatctgcccctcccgtgctaccaggttctaagagggacttaagaacacattgctagtgctggctttggcttgtgtgatgtttgagtagaggacacgtgtgattgaaggctggagtcatggagagaatcgtggactagaaatcaagtctgctggggtctgaccttgaggaagtcacttccctcggggtccttattagtgatctgagggtcagttcatggctgctaaggactttcccattctgaagccgctgtttctaagtaaaagcagcatcgcagacgggggttagtgcggtgtgagaatgctgttcaagtccattccttcaggtatttcttgacctcctactgtgtgacaggcactgggggaggcttagcaaggggctcttttggcaggtgacccagtctctaggtggtttctgttgacctcctcttttcttccatagggttctctagacttgggtctcatcaaaaactgctgcccccgctgcagttgctcttaatcttggctggaactcctggaagctcaggctctggatgcattttcaggtttagcatcacttactttcccaaggttctggctctccaaggtgaaagcgcagcctcaagggagggtgatagcccgggtgctcaaggccccttacatcctgggccttcaaagtctggctctgagagaccgcctgcgggaacgcagatgcattagtatgcaggtgtgctggtacagagcacaaagcaattagcctgctgctctgcaatttctgcctttccccagcaagtgtgactcaagttttggttcctttgcctgcatggccagcaccgtcctttctcctgtggggaggcctgggggcttcaggggatgcctgttctaattctaggagtggtccggagcatctagaccagagctgtccgatagaactttctaggatgatgggaatgtaatccggctgttctgtgctatcccgcatggtagccaccagccacgtgtgcacttgcaggatggctagcagctaatgtattagttcagatctgtatgactattttccaacattttgcaaggcactgcgagtgctaaagttaaagatgaggcaaatggtcagcagctggggtggcaggagctccagctgtacccgggctgagggtctcagtgtcttcacacacctgtgcccaccccagcaggctgggtggaaggccctgttctagacctgagctggggctggtggtgtgacctgtctccactgatttcttggccctgagacctggggtaggtggagggcgtggggaagtgggcggttttctgccttggtgtccagggtggtccggggagcccgggaggctgactcagtctcatctcctcctgagggactgagctcggagctgaatccctgatgccataaaattattttccagtttgactcttgtgtcctttaaagttgtagcacactacacttggttttaagagctaaatgtaaggcaaatacagagcactttaaatgtgataactctgagttcatattgtttgaggagataagcaaaaaggagcaggtgctttgaattcacttatcagcgttttcgcaggctcctgtccctccgcaccccccaccgaggtgccgtgatgttccacgaggatcttggaattggaggcttccccgggctgtggggccaccgtttcatctgctcaccttgctggtaaggccagggctttgttcccgggagtgctcgggccgcaggtgtgtgtgtccgggaggctcctgccgggcagggcagggagaggggcctggcctgggaagtaagcccccgtgacaggctcctcaagcctctggagccctggggagagtttgcattttcggatcacgtctccatcctccaggagaaggatgagaggggccggctttaagtcctagttcttgggtatataattaaacagagattttccttcctgaaggaacaaaaagaggccaaggacagcctaattgaaacctcaggattgcttctccaagagtggcctgagcaagtgggccgaggtagatttgcaactctggctggtggggtggcccgagccaggggggcccacgttcggctgctgacggcggtccacaggaggggagggtctgttgggcgggggagcctctctctgccttgcttccttttagggtgagcctttggttctcctgtcccaaaccgaggggggccacgtgggagccggcagcacacactggccaccactgaccgctcctgctgtcctggcacttccgccccctcccaaaacggcagcccacagtgactggtcgcaagtgccatcagaaatgtgcgccgcttacgaggctgtcaaccaggctggttcttccaaagtcgtccattaccagataagtgaaggtaaaatagtgatgctttattaattgcaggtatggcacgggtttttatacctgtttatatacacttgctccggagcggaaggactttctcatctctccttgcctctcccccacccccagaagagaatttcaactttaagacaaacaacttcatttacaagtgtgtctctaattagctgcagaattaggaaagctgagctttcccccatagatccgctcaaccctcgagggagactggtggaatagagagaatcgcatttccaattattttgttgaattgctaatttagttattgtgcctggtgtaattgtgatgggtattgggtatgcaattcaatttgttttaaatatttgtgggaaggctgatcagtaatggagctgacctattttgtggcccaaattgagaaaaaaaaaaaagactaaaacacaacagccacaaagatacagtttgtttccatttttattttgatctctctcatccctcttaagatcattgatgcaacaaaaggattaaattaaaagatgacagcactttgatcttctccctttgaaagcttaactgtccttggtagtttaatatgcagatattttagggtagagtctagatgcattgctggagttgagtagtttctgcctcctaaaattgcatttctgcatgtgcctaaaagtgatttggggtactcaactttctaatagtgtgtaaagtagtggaggtgtatctgtaacaaataacgcaaagccgtgagagccacaagttcgccactcctactgggcagaagtccattccagagtcccggaaccttccctccaggcagcaccacgtgcagaggttggtggccaggaaccccaccccgggtgtttgcataaagctcacccattgggagccctgctcctggttgatttgagcctgtgcaggtgagaggagggctaggtgacaagttccctcatggctggcggtgactctgtggagctagctccttgagggccaagctccaatgtccctcttcagccagagtctggaccgggaggtatgggccagggaaaatctgtgatgtaatcttgtttacatgcctattggatgctgagtcataaacacagtctgggcctgggccagggctgtggcttgaaatcagagctctgctgggacctgaggtcacagaaatagattgcaggagttgagccttgggcacgtacgaccgaggttgcttacaggtgactggaagccctcaccttccacagcatcccgccgggcccgccaggcgtcctcagacacaggctaactagggcttggttgggcaagatcagagggtggcggaccagagcagattttgagaaaaggttataataaaatgggtcatagatgcggctgttgtaatgaatttgatcctaaaggattcgttttgtaactcgattagcttagcaaggtgccagggtcaatttccgtgcttagctgctaaagagaagtttaaacttcattactcttacgtgagagctcaccgggaccaactggaggaactcagccccaggtggatcccttttaacaagctgttctggaggagctgggcgaggacagctgatggccgcagctgctgatcctgaggaggggctgggtcccgtgtgaggacagataggagggtgaccattgaaccagccaggctggagctgaaaagaaactggcaagcagctagagcagctggggatggaaggaggaggaggcgtttgtggaaacagctgcagggcaggagggcaggctgcggggtaaggtctgtgtagcctctaccccgtgatggtggtggttgttattatttgagacagtctcgctccgtcacccaggctggagtgcagtggtatgatttctgctcactgcaacctccacctccctagttcaagcgattctcctgcctcaacctcctgagaagccaggattacaggtgtacgccaccacgcccagctaatttttgtatttttagtagagacagagttttgccatgttgcccaggctggtctccaactcctgacctcaggtgatccacccgctttggcctcccaaagtgctgagattataggcatgagccaccatgcccagtctccattttttttctacagtgttgttattgaggtagaatttacataccataaaactcacctgttgtaaatgtacaattccatggtttttgctacatctgtggagttgtgctgccactaacacggcccatgtttaggacattcttatcaccccacaagttcctctagctttgccggaactccctgctcccagccccaggtaatttgccttcttttctgaacatttcatttaaaaagaatcatacaatctggagtgtttgtgtctggcttctttcgcttggcatgaggtgtttatatctttattgtagcatatatcagtacattccttttgattgctgactagtcttccattgtgtagatataccacattttgtttatccacgtgcctattcatgaacatttggattgtttccagatttgggcgattatatatgaagctgataggagcaatcacaagcctttgtgaaagatgttttcatttcccttgggcagatacctaggcatggaattgctgagaatgaaagcttatgtttagctttttcagaagttgttaaactgttttccaaagtacctgtatcactttatatttacaccagcaaagtgtgcgggctccggtttctccacatccgtgccaacacttgtaattgtctgtcttccaattatagcctttctggcaaatagtggactcccattgtggctttaatttgtttccctagtgacgaatgatgttgaacatcttctcgtgtgttcattattcatgtatcatcttctttggtgagacatctattcacatcttttggcctaatttaaattgaattgccttgttgccttgtaaggattctttatatatcctggattcaagtcccttatcagatatatggtctgcaaatattttttcccagtctctggcttgtcttcattttcttttttctttctttctttttttttttttttttttttttttttgagatggagtctcgctctgttgccaggctggagtgcagtggcacgatctcagctcactgcagtctccacctcccgggttcaagctattctcctgcctcagtgtcccaagtagctgggactacaggcctccgccaccacacccaactaattttgtatttttagtagagaccgggtttcaccatgttggccaggatggtcttgatctcttgatctcgtgatccacccgccttgacctcccaaagagctgggattacaggcgtgagccaccgcacccggccgtcttcattttcttaatggtgtcttctggagcacaaaaggttttaattttgatgaagcctaatttatcaatttctttttttcttttatggattatgtcatatctaagaaatcttttccaaatccaaggtcacaaaaattttctcctacatgtcttcttgtggatgttttatagttgtagcttatatatttaagtctgtaatatatttggggtaaatttttgtccatggtgtaagagtctaaaaatataactttgtgtatggatatccgaacgtcttggcaccatttgttgaaaaggctagcctttccgccattgaattgtcttgactcctttgtggaaaatcaattgaccctaaatgctaggatttatttcaagactgtcaattatattccattctatttgcttgtgtttatatctgtgaacattttaaaatcaggtagtttaagtcttccaaatttttatcaaaattgtttagagtattctgggtcctttgcatttccatataaattttaggatacatggccgggcgcagtggctcacgcctgtaatcccagcactttgggaggccaaggtggttggatcacaaggtcaggagatcgagaccagcctggcgaacacggtgaaaccccgtctctactaaaaaaatacaaaaattagccgggcgtggtggcaggcgcctgtagtcccagctactcaggaggctgaggcaggagaattgcttgaacccaggaggcagaggttgcagtgagccaagatcgcaccactgcactccagcctgggcgacagagtgagtctccatctcaaaaaaaaaaaaaaaaaattaggatacgtttgttaatttatttagcttttccttcttcttcttcttttttttttttttctgcctgagacaggatctttctctttcacccaggctggagtgcagtggtgtaatcacagctcactgcaacctcaacctcctgagctcaagccatcctcccacctcagcctcctgagtagctgggactgcaggcacatgccaccacacccagctaattttttttattttttgtagagacaggatctccttattttggccaggctgatgctgaacttctgggctcaagtgatactcccgcctcagactctcaaagtgctgggattacacgcatgagccactgttcccggcctaaatttgttaatctctagaaaaatgtctgctggaattttgatgggattacactgactctatagatcaatttggggagaactaccatcccaacaacattgagtcttctaatccatgaacatggaatatctcttcaattgtttttatttaatttctctcagcagtgttttataatttcagggtacatgtctatttcttttgcaaaattattcctatgtattttattggttttgatgctattgtcaatgaaattattttaatttcatttttagatttcttcttgctagtgtacaaaaatactattattgagtttttaaattaatattgtagccagtgactttgctgaatgcatttattagttctagtttttaaaaatggattcctcatataggatcatgccatttgtgaataatgagttttaatctcttctttccaatctataaacctttaattttcgtgtagcctattgcattggccagcacctccagtgcaatgctgagaagtagcaagagcagatatttttgccttgttccatcttagagagaaaagcattcagtctttcaccatcaaacatgaagttacttgaggtttttcacagacgccctttctcaggttttggaaatttatttctattttttttgagacagtgtctcacgtcgcccaggctggagtgtggtggcacaatctccgctcaccgcaacctctgcctcccaggttcaagcaattctcctgcctctgcctctcaagcagctggcattacaggcacgtgccaccacacccggctaatttttttgtatttacttttagtagagacggggttttgccatgttggccaggctggtttcaaactcctgacctcaactgatccacccgcctcggcctctcaaagtgctgggattacaggcatgagcactgcgcccggcggagatttctttctattgatagtttgttgataatttttatctggaatgggtattgtatttccaaatgctttttatgtgtctaccgagagggtcatgtggtttttgtcttttactctattaagatggtgtgctacattaattgatttctgggtgttaaactaactttgtactcatgggacaaatcccacctagctatggtgaatacttttttttcttttgagacagggtctcttgggtggaatgcagtggtgcgatcatggctcactgcagcctcaacttcccgagctcaagcgatcctcccaccttagcctcttgggtagctaggaccacatgtgtgtgccaccacacctggctaattttcttttctttttttttttttgagacagtcttgctctgttgcccaggctggagtgtggtggcatgatcttggctcactgcaacctctgcctcccaggttcaagtgattctcctgcttcagtctcccaagtagctgagactacgggcatgtggctccacgcccagctaatttttgtattttttggtagagacagggtttcaacatattggcccctctggtctcaaactcctagcctcatgtgttctgcctgcctgggcctcccaaaatgctggaattacaggcatgagccatcatgcctggcccacacctggctactttttacaattttttttgtagagacagggtctcactatgttgcccaggctggtctcgaagtcctgggcttgagcaatcctccctcctcagcctcccatagtgctgggattaaagttgtgaaactaaaaaacaaaaaatgttgcatggaatactatgcagccataagaaggaatgagattatgtcctttgcagggacgtggatgaagctggaaaccatcatcctcagcaaactaacccaggaacaggaaatcaaacaccacatgttctcactcataagtgggagttgaacaatgagaacacatggacccaggggaacgacacacaccagggcctgctgggaggtggagggggtcgagaggagggaatttagagggcaggtcaataggtgcagcaaaccaccatggcacaggtatacctatgtaacaaacctgcacattctgcacacgtatcctgttttttttttttagaagaaataaaatttatatataatataaatatatatatacttatatacttatatattgctaggataggcacagtggctcacgcctataatcccagcactttgagaggccaagatgggtggatcacttgaggtcaggagttcgagaccagcctgaccaacatggtgaaaccccatatctactgaaaaatacaaaaattagctgggtgtggtggtgcgcacccagatggtgggaggcttaagtgggaggattgtttgaacctgggggtggaggttgcagtgagctgtgatcatgccactgcactccagcctggatgacagagtgagaacctcatctcaaaaaaaaaaaaaaaaaagtgtgggtgtgtcttgctgtattcagtttgctaattctttttttaaagagatggagtcttgccacgttgcccaggctggggtgcagtggctatttaaggatatgctcatggcatactacagcctcaaaatcctgggctcaaacagtcctcctgcctcagctgcccaaatagctgggactacatgcacgccactgtacctggcccagttagttaatatttgctaaggatttttgcatcctgtgttcacaagggatactggcctgtagttttcttgtgatgtctttggctttggtatcagataatactggccttgtagaatgagttggaaagtgttccttctgttttctaagagagtttgagaaggaccagtattatttcttttttttttttttttttttcaagatgaagtcttgctctgtcacccaggctggagtgcagtggcgtgatctcagctcactacaacctccacctcccgggttcaagcaattctcctgcctcagtctcccaagtagctgggattacaggcacccaccaccacacccggctaatttttgtattttttgtagagacagggtttccccttgttggccaggctggtctcgaactcctaacctcgtgatccgccctccttggcctcccaaagtgctgggattacaggcgtgagccactgcacctggctgttatttcttctttaaatatttgacagagcatttaccagtgaagctttctgggactggggctttactttgtgggaattttttttttttttttaagactgagtctcactttcttgcccaggctggattgcagtggcatgatctcggctcatcacaacctctgcctcccgggtttaagccattctcccgcctgagcctcccaagtaactgggattactgttgtgcaccaacacacctggctaatttttgtatttttagcagagacggggattcaccatgttggccaggctggtcttgaactcctgacctcaggtgattcccccacctcagcctcccaatgtgctgggattacaggtgtgaaccaccgtgcctggcctgtgggaggatttttagtgactaatttctttatttgttataggtctatttggattgtgtgtttcttctcaagtcagttttggtaaatttgggtctttctaggaatgtgttcattttacctaagtctaatttcttggcataaagttgctcataatatttctttataatcttaattttggtagagccactagcaatgtcccctctttgattcctgattttggaaatttgtgttgtttctctttttcttcttgtcaattttattgtttttttcttttcttttcttttttttttttttttagatggagtcttactctgtccccaggctggatggaatacagtggtgcgatctcggctcattgcaacctccgcctcccgggttcaagtgattctcctgccttagcctcccgagtagctgggattacaggcgcccaccaacatgcctagctaatttttctatttttagtagagacggggtttcaccatgttggccaggatggtctcgatctcttgacctcgtgatccacccacctcggcctcccaaagtgctgggattacaagtgtgagccactgggcccagcctgatttttttcaaagagctaactttaagtttctattgacttttctctgttgtttactgttttctctttcactagtttccactctgacctttatgttttcccttattcttcttgctttgggtttagtttattctcctcttttttcttctctgtttttttggggtggaagtttattgatccagatccagacctgttgtctatttctcctttttattctgtcaatttttgctttctgtattttggggctctgttgttaaacatgtatacatttataattgttatagcttcctgacaaactgattcttttagcataataaatgtttatttttgtctctaatgacattatatatatacatatagatagatatagatattgatattgatattaatgtagccactccaacccttatggttactgtttgcatagtagatggtgtttttatacctttacccacttgtgtctttgaatctaaagtgtttttcttaaagacttaagacccagcctccacaaaattaaaaaaattagccaggtatggtggtacacacctgtagttccagctactcgggaggctgaggcaggagtaacaggcattttgtttgtttttttaaaattttaattattatttttgagacagggtctcactctgtcactcaggctagagtgcagtggtgtgatttaggctcactgcagcctcagcctccagggcttgggtgattgtccctcctcagcctcccgagtagctgggactacaggtgcatgccaccatgcctggctaattttttgtattttaattttttgcagagacgaggtctccctatgttgcccaggctggtctcaaactcctggactcaagcaatctgcctgtctcagcctcccaaagtgctgggattacaggcaagagccaccacacccagcctagattttttcacctaatctgacagtctatcttttgattggagtgtttagtcctttcaaatttaatgtaattattaataaggttcatttgtttttcctttactgcttgcttttgtgttttttagagacaaggtcttaccctatcctgcaggctggagagcagtgatgcgattacagctcactgcagccttgaactcctgggctcaagagatcctcctgagtagctgggactacaggtgtatgccaccacgcctggctatttttttttttttaatttttctggagactgggtctcactttgttgctcaggctggtctcaaacttctggcttcaagaatgctggggttacagatgtgtgccaccacacccagccccagtgttgtttttaatatatatatatttacatacatacatgttaaattgtggctaagaaaacataaaacttaccatcttaaccatgtttaagtgtacaatgcaatagtgttaagtatatttacattgtcctgcaacagatttccagaaattcttaccccacaaaactgaaactttatacccatttaacaattcccagtttacccctcactccgacccctggcaaccaccattctttcagtttctatgaatttgactactttattttttatttatttatttttttgagacagagtttctgtcaccagactggagtgcggtgatgcgatctcggctcactgcaacctccacgtcccgggttcaagcgattctcctgcctcagcttcccgagtagctgggattacaggcatgcaccaccatgctcagctaacatttgtatttttagtagagatggggtttcaccatgttggccaggctggtctcaatctcttgaccacaagtgatccacccaccttggcctcccaaagtgctgggattacaggcatgagccactgcacccagcaaaattcgactactttaaatacctcatataagtggaatcctacagtatttgtctttttgcaactggcttattccacttaacagaatgtcctcaaggtttattcctgttctagcatgtgattggattgctttcctttttaaggccgttgtaatattccattgtaagtatagaccacattttgtttatcaatttattctttgatggacatttgggtggctttcacctcttggctattgtgaataatgctgctgtgaacatgggtgtgcaaatatatattcaaggccctgctttcaattcttttggatatctgcccagaagtgagattgcttgatcatacgtagtgcttttttttttttttttttttttttttttgagacagggtctcactctgttgcccaggctagagcgtagtggcttgatcatagctcactgcaacttcaaactcctgggcttaagcagtcctcccacctcagcctcctatttttcattttcgtttcgtttttgtttttttttgaggcagtctcgctgtgttgcccagactcaagcagtcctctcacctcagctgcccaagtagctgggactacagccacgtgccatcacccagctaattttttattttttaattttttatacagatgagggtctcactgtgttgcccaagctggtctcgaactcctgggcaccttagcctctcaaagtgttgggattacaggtgtgagccaccacacccggccctacttttaattttttgaggaaccatttttgcatagcagctacaccattttctattcctgccaacagtgcacaagggttctaatttttccacatcgtctgcaacatgttattttctgtttgttttttatagcagacgtcctaatgggtatgaagtgttgtgtcgttgcggttttaatatacatttccccaacaattaatgatgctgagcatgtttttatatgcttcttgaccattcataaatcatctttgaaaaaatgggtttaagccctttgccttttgttgttgagacagggtcttgctctgttgcccaggctagagtgcggtggtgcgatctcagctcactgcaacctcaacctcctgagccagtgctcctcctgcctcagcctctcaagtagctggaactagaggcatgtgccaccatgcctggccaattttaaaaaaattttttgtagagatagtgtctcactgtattgcccagcctggtctcaaactcctggactcatgtgatcctcccacctcagcctcccaaagtgctgggattagaggtgtgagccactgctgccagccttactatgcattttaaagttattttcagctgggtgcggtggctcatgcctctaatcccagcactttgggaggccgaggcaggtgcatcacctgaggtcaggagtttgagagcagcctggccaacatggtgagaccctgtctctaccaaaaatacaaaaattagccgggcatggtggtgggcgcctataatcccagctactcaggaggctgaggcaggagaactgcttgaacccgggacgcggaggttgcaatgagccgagattgcatcattgcactccagtctggatgacagagcaagactccatctctaaataaataaagttactttcttagtggttgttctagaggttatataacactatacttgagattaatattaccttaatactggcaacacatagacttggttttcatgttgtttcatttttacccccttctttgtgtgactgtcatacatattacggttctatatgctataaaccccaaaatacagtggtatacttattgtttaatgcaactttatgtcttttaatgaagttaaagagaacacagttttttatatttacctaggtactgtttaccttttcatttctttgagtagatttgaattactatctggaattatttcttttcagcctcaactattgcttttagtatttcttataaagctggtctgctaacaatgaattctctttttttgtggagtgtctttatttcacctgtacttgttttaaggacagtgttgctggatataggattcttgtttgacagcattttttttcttcttgtggcactctgacaatactgccccactgcctcctggggtccattgtttctgattagaaggcagctgtgatttattttgttattcttctgtaagtgataacttgttcttctctagcttcctttaagatttttctttgtctttcaacagtttggccatgaggtatctaggtgtaagtatctttgtttatcctacttggggtttattgagcttcttggatctgcagattcatgttttccatcaaatttgggaatttttcggccactatttcttcagatagtttttccatttctctctcttctggcacccccagtacacatatgttggtaaacgcactgttgctgcacaggagtctgagggtctattcatttttcactcttttttcctctctgttcttcacattggataattctattactctacgatttcacatgcactgattcttctgtcttcccaaatctgtgtagtccctctggtcaacttttcagaatttccttttcaaaaactgggataaatatatgatttaccattttaacagtttctaagtgtatagttcagtgacattaaggacattcacattgttgtgcaaccatcaccaccatccacctccagaacatttcatcatcccatactgaaactctgtactcattcaacaacaataactcccagctgctacagtggctcatgcctataattccagtgctttgggaggctgaagaaggaagatcgcttgagcccaggagttcaagatcagcttgggcaacacagtgaggccctgtctctacaaaaaaaaaaaaaaaaaaaaaatttttttttaaattagctgggtatagtggcttgcacctgtagtcccagctattcaggaggctgaggtgggaggactgcttgagcccaggagtttgaggctgtagtgagctatgatcataccactgtactccagcctgggcaatagagcgagaccctgtctctaaaaacgaaaacagtaatccccaaattcctctccccacaacccctggtaatcactgttttattttctgtctctgtgaatttgataatttcagataccacatataagtggaatcaaacaatatctgtttttgtgtctggcttatttcacttagcataatgtcttcacagttcatccatgttgcagcatgtttcagaattttattcagaatgtgcttttttatgttttgttttgagacagggtcttgctctgtcacccaggttggagtgcagtggcgtgatcatggttcactgcagcctctacctgcctgggctcaggtcatccttccacctcagcctcccaagttgctgggacgacaagcgtgtgccaccacacctggctagtttttttttttttttgcattttttgtagagatggagttttgtcatgttgtccaggctggtcttaaactcttggactcaagcgaaccgcccaccctggcctcccaaattgctggggatcataggtgtgagccaccatgcctggccaattctttttttttttttttttttttaaataagggcccaaggttgtcctacctgaccctttaattctgtaaatgtgtgtgtgtgtatgtgtgtttaagtttctgcccagttgtttttatttgtttgttttttgagacagaatctcattctgtcacccaggctggagtgcagtggcacgatcttggctcactgcaacctctacctcccgggttcaagcgattctcctgccttagcctcccaagcagctgggattacaggcgcacaccaccacacccagctaatttatttttagtagagacggtttcaccatgttggccaggctggtctcaaactcctgacctcaagtgatccacccgcctcagcctccccaagtgcaggaattgagccaccacaccgagcctctgctcagtttttctttttaaaacttcttattttttaagcctagcttcataggggccacccttgtgcctaatggtcagccaatgctttaggcagatgtatcttgagccagcaaggcatctatcttctgctgataagttggtgtgtgtgtgtgtgtgtatgcacgcgcgcgtgggggctacatattaaaacatttcagcagttttgaaatctgccctggcttttactttctactgggccctctggcatttcctcttcatgtgcccacaggttctatcagctagggctgtgtgactagcttgggccttctctgatctctcctgtgtggatgtgcggggagcttatcaagcccctggtggctgtatcatttcctgcttctgttaaagctctagctaggctgctggtctattgcttgagccaagctgagccactggtcttccctggatgtttgctgctgagttactgctgttactgacaatgccagtgggcatggagtatttttatccagacttcagcattacccatgatcccagatgaaaatctgcctagagctggaagggatcttagggatcttctcgttccacactctactttcacatcccagggaaggcaggactccagaacacccttgagctgctcaaggcctgccctaagtgagggcagccaggcttagagatcggccttcaggctcagctgcacagcccctcagtggcacttccgcttagtgtccatgtcacccaacacgtagagacaatccctagaccctgccctcgccaggggacggttctccaccaataccctatgaggaaggtgcccctgagtgatgacaggcgcccagtcttgggagcaaaagagacagggcatggagaaacctgacctgcattgagggtttgcggctcatgccctgcacttgattcacatcaactaatttaatgtcatttttcaaaatgccccattgaggtccacatttcacagatgaggaggcaggaacttgctcaaggacaagagtgaggggctggatactggaaatcagctcaggcttattctaaagtccctgttcttgtaagtgactatgaaaggagctatttgcatggacaggaatgctctgtgagctttttcctgctgcagagcctggacttgtacagtgggttctgcctcttcccacccccagccctccctgattactctagaaggccagtcatgacacagaatgttggcaatcagactcagcgccatctgagctattctgtcctgtctccgtgcggttcctagtgggctgagcccactgtgtggctccaagtctcaggctccgttatcattctgccctccaccaaccacaggaaaccccatgctttggaagatgttgcttattaccaagatactgcatttctaaagatgtcctacccccatcacttattatcaacacccattagagccactggccagcaggaggtgaccaggactgcacttcctgggtaaaactccagtcaacacaaagacaacggcatggaaagactgctgcctgaggcacagcaggattcctagagcactggaaatagccgattgttccccactcctgtgggtggcccgggcatactatcctgggtgcccctccagcttggggactgcacacgattaagctgagcttggacccagttttcttggcactcaagactgtgctcttttcattcaattggctgctttcgaaagctttatacacagctttcacgtgcccataaaccaccaaaggacaaacccttgctccttggcctggcatttaaggatctttatatctgatgccggcttgtttttggggagttcattgtctattactcccccaagtgactgctctactccccttcaaccttcccagtgccccccaaataactttgtaaatcccagtgccccggcctggaatgccctggcttccaccctgccgcagctggtagcctctctctgccaataagcttcatttgtccataccactccctctggcccatggtgctttctgcctcaccatgtggaacagggcaggcccaggtgttacccttcttgtgcccagggcctgaggagccagtggtttgaaggaaggtttgcctttcagctcagtgcctccctacaggcctttccctgctgccctgcaccgagccctgtttactaggggtgaacagccctccctatggtccttaggcatttgcgttcatcgctgtgttattgttcagccggggaaagagaggtgggcctagatctggatcctagaaccctcactgtgcagtcttttccttactaccccaaagtaagaccaatggggatttattatttccttttgttgaaaagaggagtgaaggaagtgtggcgccccagcagaagaaactgtatcgggcaagctcccagaggcagcagcggaatcctgcctcagaaccaccaacaggtgctggctgagtgcttacacctgtggcctgtcttcagctgcctgcttagggaggagggaagaaggaagaagaggcccaggccgccacgcagaccgggcttccttgcctgtgaagagcagcagtgggaggcaaacagtagcaatcttccccctggatcctttatcctgtatctcccttctgactcccctttctggaacatctggctcagggtgaatcaaattgatattttcttaacactctatttcattttagaaaaagcaaccctttgctttgcaatatatcccaaagagagagacagatacaacattgagtttaataatcagcaaagggcagggatttgcctcctgtgacctgtatctttgcagacattcaggaattggtgcttattcctgccttaattatagggattcatagaaagcttttttttttttttttttttgagacggagtcttgctctgtcaccaggctagagtgcagtggtgcaatctcagctcactgcaacctccgcctcccaggttcaagcaattctcctgcctcagcctcctgagtagctgggactacaggtgtgtgccactgctcccacctaattttttatatatttttagggggtttcaccgtgttagccaggatggtctcaatctcctgatctcatgatacacccacctcagcctcccaaagtgctaggattataggggtgagttaccatgcccagcccatagaaagtttttttagagagagaaactgaggcagagggttgacggcatggaatcatgagcttcctgccccgagtgcctttttgtgcccagagttaaaaatccatgaatagctaaagaaagaaaatctaaaaccttcctctcaaatctctaacaagggccatgcggccccagtgtttacactgagttatcagagcactctcaacttcctgtatgctgagaagggacttctgaggaggacagtgggctctgggcttccaaggcctggagctgttatcctcactaaacagctgtggtctttcttgtccctgctctaaagacattctcttttggaggggacattcctgccaggactcccatccagctctcagcaggaagaagtttcccatcctgaaaaactcaacagaaactaaaaaactgaccctctgctacggggttcccgagcatttgtagcctttcagagtttgaccttgattcagcggataagacagggctggccaaggccagctttttactgcctacccatcatctttatgcaagttcaggagacaaagggctttaggtgttacagggccatggaggggcttgccccacactgagcccctgctgaaagcagaacaagaaatgaggtggctgggcatggattgaaatgacaaactgtaactcttctacaaatgtagaggtttatttcaacaaaatgtgtaaagagtgcatctgaagctcctgctcatcacagtatgtgtccatcaaattctgagacaagtgaaggctgttttgtgaacgaagagaacagataatatggcggtctccgtccaagcaggtcttggtcaatatccatcatttatactcctcctgccttagtagccttgcatgtttgaggggctgtgggaatgtcagattgctcatgttctgtgcctccaacttgaaaaaatccttgtccagggtaagacctacagtaaggagctctggggatgggggaggaggcattacagggttctagagaggaaacatactcgtttgtgtcataatttggtggggagaggggaggtaaatgagtgtaacccaccctgcctctgaagacatgcctggacaggcctcctggggggtgcaggacttcataccacttgtagatatgtgggatttgatttattgcaaaaaagcatagaagaataatctggtcaaaaatgaatccaattcttactaggtaagcaaatagccagcaatggtcaatgcattttcctggactgagaattgtcccccaccactttatgcccttttctgaaggtgctgaacacctgtaccttccaccagggcagccgggctgaggctctgactcctgggggctgtccgctccatacccagccatacagtgcccacctgcaacccagaaccattgaaaagtccagccaatctatccgcacagattcctcctgaagaaggggaggtggagctcgttcttgtgtgcaaactacagggttaaggctcagaactgtggcttgtccaagaacgttcataccactgcttctcaaatgtcttagtgatttcctccttggtcatcagtgacaaatgcagttagctgcactaaaggaaccggatgctacaccagccctgatcacctgccactcttgctttaggaacagaggaatcagtaagttcttttcttgaataaactagttgttgaaagtaaactctctccaccacctgaggaagcccctgatgccagtcaggaggggccagtaagcctggaggacagcagcaccatgactgagttgtaaataatcttaaggtcatgtggattctgtgtttcctggaagcctccctcatcaggaaggccagctcctggtgctgagggtgtagctgtcaccagggtcctttcagagctgtggggagacctgctgcctgtctacactctggggaagagagtagaaccgttagctgctaggacagtaatcctggaactagggaagagtgagtgtggaggcaccattaacctctcaaaaccatccaagctccaggcttcataggaacaactttccaagtcctcaaaacaaacagactatctatctatctcactggctctccacatggcataaataactagtttccaccagtgcagaaagggcagttctcttctggctcctcctctgccaactcaggcttcaccacctgtggaactgctggggcccctcaagcactggccttgcagctcccagccacatgcgacagctagtccagcagtgacgtgcaggcgagaggcaggccaacaactacctttccctttgtcctcagagactgaacccaaggttgaggtcccctaaatcaagaataactggttctattttctttctctgcttcttggctcacagttttgccctcatctttgagttcctatggagcttgtagtagattttatgctctaatttttcttcataaaaggtaccgtagtgtggttaaactgggaatcattcctctccagtgcctactgtgtgctgggctaagagtcggggtaataaacaatggacttgaggcttcctcctctccttagccctcctctgctgcctgtggctgcggctcatggggccaggagtgaggggggctgctcactgctgggcaactcctcacgcttccccatgctgggaggccaaggggctgtcaggacaggaggggcagccctactttggttagtaagacctcatggtacatgtttgtacctttcattgccttctcagtcctgtgcagggagtggaggactaggcctggccagggtaataaatactgaatggggtaggtgtgactggtgggctggagggggattctgtgatcttacatcccaggatgtcatgcataacctgaaacgagaggaagtaaaatgccatttgactccagtgctgggtctcctgtgccttctcattacagtggttacagttgtaaaaggcagctctagcccttttctccagagacagggcagggacaggcaggaagctcttcctacgtggaaggggaatccattgtggagaggatccgtatgacttctgctcgctgagtgggtgatatgtgctgcgtcatatggatgatggaatccatggcaacctctggattggcctggaccaagctggaaaggaagattgagaatggtgaagaaaagagaagcagaagtgtctagatgaggacagctaaagaactgcccaataaacatgtgtgcaccgtccactgcagacattttagtcacgcctcaccttatttgtttccctatattacaaatatccagccaaggtagtgcaagacaaacccaaaacattttgctatgttgaaaaaggaattaaacccaaaacaaaacccaaaaaaaacccaaaacatgccaatgggggcatgtcacaaagacagcaattggggcatcaaaagcagcccagcaatgaattataaatcagtaaaaaatagaacttcatgagtctgtaccaataatgtatatataaaagaatcggcaggagtgaggactgagtggtgactggtaattgtggagggtgtgctggagttggaaagttatcattttgcaagctcatcgtaaagactgcaccagagggaaattttgatgaaagcaagatacttgcatggccttaaaatgtcttcctgcagactacttattaggtgcaaggggggaaaatcagtaattatacggtagagaaatggagcaacatcttgaccagcggatgaaattaacacgaggaggagcagataaacagcatgtgcccccagatgtggtgccctgtgaaggttctggccagagtgcctcacctgcatctcatcatggggagacatcagacaaactcaaaatgagcaatgttctacagatggtagatatcagataaaagtttttaatcaatgttaaatttacaaaagtggatcattttatgatggttatgtaaaagtatccctattctcagcaaatgcacactgaaatatttgggggtaaaggccatgatatatgtaacacccttaagtagttcagaaagaggaaaaatgtatacacatatgggagggcaggcacactcataagtgatatagcaacggggagaaaatgtaacaggtaaatctgagtacagatattatatataggggtgttctttgtactgtttttaattttataacttttctgtaagtgaaatgtttccaaataaacttttacaaaaatgcccctgcagtctctaccaccgatcctatggagcagactgaagcctctagaagaatacagctaactcttggcttcaggaggtgaggaggtggtttcccaggaaaccaccacacacacaatcagctttcctcccagagttgttcatccggtttgagtatcagcattcagagctaagaggtgggcacagtgaattaagccttcatctagctgagattactaagtgcccctggggagcagtagctgaaaaagaattgggcttcaggccatatctgtacctgtgggtcaactacagctgtctcaaacagcaagagactgcagagatcataagatttctgcgatcatctcatgatttgtttggaaactttttattccaaagaaattagccctccttctctagtggagttccccacgttggtctcacctgcggatttgcttgaggacgtagtctctgctgatgcatttgatgttttcctctattaccgagtgaacaccatcctcctctgtcagctgtttctctagccactccgccagatccttattattgtcccaaacataagcctgcaaacagatgactcttggtcaaacaccaggggtcaggccaggccgggacaccctgactattcaggatctggagtgcttgcttactccaaaagtgtgctccgtgtccacgattctccttcactgtcagcatcgtgcaggaggaggaagtaggcctcgaggcaggagctgtgccccttctccttctcttcctttatggacacaggtgtacacctgaagtctccatggggctctcccgagcactctggtgctcataccctgactctgtcctgtcagactctagggacccacctatttgacaaaggctaagagaattcaataacctgacaggtttgagagaaccagttaaaagcccaaattacttagtaaaattgtgattgagaaggcaaggctgtttatttggtgttttgctctcagaggagctgagacacaatgcctaaagtataagtctctagcctcagtgaggcctggcagtcactggatggatgaagtctcctgaaatagagcccactgtcttttgatgaggcacggacggggaactgatgggagggaagtcttgttgccagggtacagccaccaggtcagaaacctaagccccattttattacctatgagagtattcgaaaggatcaagacgtccataaccctgaaagtctcaacaaaccacctctcacctccttttcaagatcatttagctgagtatttcctaggtggttgactacataataattcaggagtgtgttagaagcctaatagccttctccttgctctcttctcctctcattttctttacaaatcatttaggaatcgttttgttaatggtttccggaaaaccaagtaccacaattagggctcattcatatttatgtcattttgtttgggtaattaaacacaaagcttgtcatttaaaggtgcgctatccttctctgttatcactaacgaagtcaaagtcagaatgacaatgagtttggtgctataatttaataggtgggtgtgtttgttagggactctgaggctttgaggtttgagacgtggctacaggaagcctgtatgcaagcaaggtcaccaaagccacagctgtgactactgggctgcagaggaaatgtcttcatcacaagaggcctcaagcagtacaaaactgagcactaggctattttctaactatctcgtgccttcaaatataatggtttcttttcagactgtcacttcctgtctctaacttagctgccgacttagttgtgactggttatttaatgtatgtcatttcatcgacgtctctgtttctaaaaattaactcctttacattggaaagatgaaggcttccggggactaaggatcagcagtatgtctcttttagttctttgtccatttctttttctgactcaaatgtgcccagttctgtatctaatcactgataagcagatcagcaattcttcagctggggtgtgtggccccgtcagtgcaaacctgagtgaccctctcctctctgtgcctgggttaggactcccagcatctctcaaggccaaactgccttgagaaagtgttttgcgcctaaggaaaggaagtgtcacatcagcccctatccacgagggagaaggtagcactgcttttcccataacatggttttaactcactcttgtgacccagcttgctgcacgccccacatatggatgggtccccctggactcctaaacgtcgccacctaaatttcaacatttccatttccatcattggcaatttactcttctgctccgtggtttcaggacttctacacatacccctacttatgaagattggggtggaggggaggaaaaataaaacaataaatgcttcttggatttcagaatggaaaaaaaaaaaaccccaagatttttagatttacccaagaatcccaaagcctttagtttaggagaatatttaatactcttattaatcatttttaatccgtttgcttttaattaagaaacagcatgatgctttcctatcaacatatgccagggagcagattaattgtggcttaagataactctccttgattggtgtaatgtattagctaacgagatgcctgcttccaacaatgctcagacactacactggaaagccagctaccctctagagaaaactcttctgccttcccctcctgcagccacagagtatgctaggtgtttaaacattttgaaaagttcccagacaggattagggcaacgcattccaagttttacagttgcttgaaaatatgggtcctataaaaagatctgctgtttacgcaaagtacaactggatgacaatgaccgccaaaccccagtggattacagcctagagtacatgaaggaaaggggtctcaagttctaatcaactgcatgtttagcaaaaataaacaaacttatgtaagcatagtgccactggtttttctcaacagacctgggagagttaccatactgttgtgggataatttgctccacctgggaaaagcaagctcccttccactgggttatggagtttacaggtttttttttcttcccccagacagggtctcctcctgttgcccaggctggagtacagtggcatgatcacagctcattgcagcccgaaactcctgggctcacgtgattctcctgcatcggcatcctgaatagctaggattacaggcatgccccaccatgcctggcaaaactttttttggtagaaacagggtctcgttatgttgcccaggctggtcttgaactcctgggctcaagcagttcccctgccttggcctcccaaagtgctgggattataggcgtgtgccactgtgcccagccagagcctacagtttcttgtttgctcccttagaacagttgtaagactcaattccagtcatccagaaggataggccaaccttattcccaggaagaagccattattatttccctccttaaaattatgaaaatgggcctggcacagtggctcacgcctgttatcccagcaatttgggaggctgaggcagggaattgctggagtccaggagtttcagaccagcctgggcaacatggcaaaaccccacctctacaaaaaaatcagccaggtggggtagtgtatgcctatagtcccagctacttgggaggctgaggtgggaggggaggatcacatgagcccaggaggttgaggctgaaagtgagtcatcatacctactccagcagcctgggcaatagagtgagacaaaaaaaaaaaaaaagaaaatgtggccagtcattcctagtattccagcgtggactttaaacaggtgtgatatgctaggctgctaacatcatgacaggcctgggcccgtatgccacctgtcagcatatccatctgtatcagaacattttatcaataaaatatcaataattctacatcacaacagtggcctgtcctaaaatgaatgttcaacagacactttctgtctgcatcagtggataagtatctcaggcactagtcagcctcactaattttatgtagtaattagtctatctcacaacatctaaatgacctgtttggaaagtttcatttctaacatactggatagctgttaagtcctccttagacaatggttcagcagggccaaggagtgaccagggcacaacctgatggatgtgagccctgattactataccctactaataactcaccttgggagctgctgggagacacctccagctagggaggctcctcccatttctgaccttctagacttctgggaaacacacagcctgatgggtgtagggatggcatacaaatcctaaggtacactcatattttggaaagacattttcaatacacctacacttacaaggctaagccctatccaacagaagcccaagaaaggatgtgatttttttttccaagggctttagagtacaatagccaaaggacatgtgggctagggtggccatcagacccctgtgaaccaagctcctgtgagccaatcccatctcagctccaggcccatagcagggccaagcaacactttccaggttctaccttacctcctccctgcctggccctgtgtgagaagtttggtgtatgagacttattcatcagtagcctgaggccaggttttgaggtcagtggaaataagtgaccctgtcaatagtgctttttcctatggtcctcacaggggcctctgttgagcattcatttcacttggaaatccagaataagagcgagtgggtagctgtgtgaacaataagaatgcaccatggcatcgggttgtgggaacatgagagcatgccaaaccaaagagcgtctgagcacccactgtgctcaggagtcagccccctttccgccgaggtcaatcagctgtacatttttgacttggtctatgttgctattatttttttaccttctaacatggagcaggggaaactagcatattttgaatgtctactgagccagacattgtgttccatactttttctttttggagacagggtctcactctgttgcccaggctggggtgcagtggcgccatcatagctcactataacctcaaattccttggcccaagcgatgctcctgcctcagccccctgaggagctaggactacatgtgtgtgccacgacaccgagcaaattttaaaattttttgtgaagacagggtcttgctttgttatccaggctggtctcaaactcctggcctcaagcgatcctcccacttcagcttcccaaagcactgggattacaggcgtgagccaccacatctgacttatgctccatactttactcatgttatttaaaactcactgaaccccatgacataaacaccacccccattttacagatgagggaatggaggcttaaataatatgcccatgccagtaaatgacaaagctgggatcccgaagtttatgagatttcaaaacccacattctcattgttccatgcagagtcctaatttcaatttctactattggggtctgggaaaaaataaatcagcctgtttgaaaaaccaggcttcaaattttggatctaagaatcaagtgagaaaccatgcccaggatacaaatgtgtgccatgttcttatgacccaatttaaactactgttcttgttattttcgttaaggagctgtagtgatgctttgcttctgcctgcagtgaaactatgaaccataaatcctactatttcctacagtaggatcgtcccagtggattcaaacagactcccataactcatggtaacagatatctctaagggaaacaaaagaattatagtgctcagttatataatatcaccgtgtcttcaattttctgtcccagaatttctgttttcaggattaagattaagaaaacaaattctctgggaacaaaaagaacacaaggcatagctaatagatgcctatctcgaaatgtcttttcttaccagtaaccaaccacaataaggattagagggtcacttcctggtgcaaagccagggtctagactcagccagtctttgcacttgagaaacacaacacacagtatctatcattctttgaagaaccacccccccccccccacaccaaacagcaagcagattgtacatcactccttctgaggcacacagatggcttttgaacactgcaaccctttcttctctcaagggcactgcagattttatcacccacctcacactaaactaggtcctgctgagcctgccgaatatggaaggaggtttcaaagccacatgccctgacatcataggattacccgtcctcacgttcagtccttggcattcctctcagagaactcaggagaatgctgccttttgtagatgggcacaagggaaatggcctcagtgctcagcatggctgcccccagtgcctaggcagcctcctactgagctacggggtgggggttctcttctgtgcttcaattccagccaggagcttgtacacacgtggtcaactgttctctccattgataagagacggcagtgacctatttcttcagacgctctgtccgcttgggagcaggatgctagggaaaagctgaagggcctatctacttgcttcatgcctggggggaaacttccttctcatccttgtgcctactgaggctggacacgtccattagtgactaatgtggtagggaggcagtgcaggcctctcctggccacacacatacacacacactccatttacctagccggccactcttaactggaggacaaactcttattttacacttgcgtgactttcaatgccaacttccactagaagctgccagtagccactgacaaaattgtctcactcaattatgatgccacagactgaccttaacctgaaccaaatgtcggagaaggctgtgctccccaactgcacatttgaaatatttatccaaagaagcttttcagtcataaaaaaaatgggcagacttaatacaaaggtgaatcctagaagcaccccaattcactggctttaaaactgacagcaaatctgggagctcctccttgagaacgattagcagaggcttcaggcaacactttctaggcagaggccagagtgcccctctttgtgggccaggacccttcaagccaccaccagccacccagccctccatcaatactctaacctggtagtcaccaaatgtttgtgatcacatagcaatgagaaagacagacaaatatattttgagcacatactaccaatattctgataaaatgcatttttgatgtaaatgattaatccatatattaattactaataaaggttaatttctttttgttagtaaaaataaacagaaataaaagttccagctttttcttcccatccatggagtgacttatgcagcccactattccaggagcaaatgctggtgcccttgctaggtcatcctggcttgagacccgccccatccccaacactgaggctagagcaccaaggacaccatctcagtggggttactgctctaggtcacgagccctctctgtgagatcaccccaagaaaatgccagcttcataggtccctttccctgcataagggtggatacttccttccatctctgattggaagtaggcagctctttagttgtagtcatggcatctcctgccgatcacaacctgttaggcttctgctcttagcccctccaattccctcctccacacagcccccttagtggtctttctaaaatagaaatcagagcatgtcactccactgcttaaaatacctgagtggtttccgacaggcctcaggacaaagtccaaactccttgacagcttacatggccctgtgtgatcatgcccctgccccttcttcctaccaggcacccagtctctgagctgccctgaaacagttgcaggatgttcctttgatgcatgttactcttactctcatggcttaggatgatgctgttccttctgcaggaacattcctcctaagccctgactgcccccaaatccagccttttcttctggttcatttctgctttgttttccagcctctcctgagacatcacttactgcacaaggcttcttagactctcctccatccttcccagagagggtcaggtatcttctcgctgtgctctgtgccctttgctgtgtttaacatgggcctcactattgtgcataacctctttatttgtctccccctctagatggtgagctctatgtggataggaacaacatttgcctctttcactgccatgcccccagaagcaaatgcagtgtctagtacccagtaagtgttcaaaaaggtctgctgaatgattgcataagctgcaacatatgccctaccacctcttctaacaagatgtcgtgacatgacatgttagggggagtagctgggggaggaaacagcttggatctctatgtttcccttctactcctgcccttagaggcctgtggactctttgctggcgagacttgcagccctcaggtggtgtgaggaactcagcaaaaaggcttctctttgagtgtcccacctaccttcactgttccttccacttccacaaaccagcgccttaacatggcttgaatctggccatcagtcagctcagggttggcattgtggattttcttcttgaccaggtcctccagcagaagacgcctcagccgccagtagaagaaggtacgggatgttttccaatccaggatatcctacatgcagagaagaataaacttagcccagtcctaattcctgcttaatgctcagtctggagggaaacccacaggcataaaaactgattctccaggcaagcccttcacagacccaagagctggctgtaaactcctagcacttccagatgtcccccagggcagaaatgcagcccacatgccctgctgtctgcagcactgtgcacagccatgggcctggctaatgctgatcccacacatggctgagatgttctggggaagaggctgtgagttcccagataaccagacaaggataaattcgttttgagaagatggatcaaacaacttgcagatcaattattaattagctgctgcgggagccttgaccctatagtaacccacatcctgaggacccgtcaccaatgaagtcacatgtgactcagtttcccaccagtaaaatgcagcttgcctcctgaggaattaatggaaacctaaattatacattgttttaagatgataacagttacagaaacagtgaaaatctaaaaaatattgaaaatgttttgatctgcagaagttgttttaatttggccctcatagctccctgcttatgagcctgtgtgcaacacacacacacacttgcccacatgtgggcctctgacaagaagtggcaaccattgtacttacgctaataacacccttctcctgcatccggcctggtgtgtcgtgcaagtcagcaaactgcacggctacctgatggtaaatgggaattaggaattcctcccgctccttcaacttgttctccaactccttccgctcagctgtgcttagctctggggtccctgcaattagataaacatgcccgtcacactctgtaatgaccaggaatctctctgcacaaaagcagccacaatcacgggaagctcaacatcagcctgccccctcttccctctgtggcctggctctccgttgtcttctctgctctttgctgattaacagggccctacaagatgccacaccagtctttaccttgccacaagaagcccacatgccctcttttccctgtggcagtcacaagtgtgaaggcagatggcagcccctctcccatgcctctccctgagaaggtgcaagtagcgacctagaggcctgctgcatattgctgacaccacccaggctcctccttcccctgaggccagtacttgtacactgacaccatgcccatccctgctgaccagcatcaaagcagctgggctattccacacgtgggatgtggtgagagcacccctaaactccgagcacaaactagtagctcctgtttccgtgtacatgcgagttatctgccaaacttggcaaggacctgaataactcctaaagttacaagccatagtacttcatggcttctaatctcaggtttatatactcttaacctctaattagtagaactcaatctaattagagctagatcctcacatcttgtgtcagctcagtgggttagcctgtgctctcccgcctgggctgctactgccagagccagtccctgaccagacaaagacattctacttcttaggctaaaggagaaggaggatgtaaaaagagaaaggcagttggcaaacctcatttggatcactgcgcacggtaccctgactcaacagacaggagactttggaaccccttataccaaggagggacccctcccccaatcaatagtgtcccagtagaggtgttgctatggtgtgcctttcttcctaattactctcagaatgggatctgcaatcaatactgaaaatttagctgcctgcctagtaaggaggagtaagcctagctgaaggagcaataggtgacagcccctggtgttagggacaccctgaagtgctttgtcaccaaagctgacaaataaatacatgagcacaggtgataggatgcagaagaggaaggtctatttcaagcatgcctgtctgggaacaggccttgttttttacaccacaatgaatcatatgccataaaaacagccttgggctgctgactgagccgtattatacataaacacaggttaacagaggagggatgtaactatagtacttaagtttcatttttattagttttttggatgcccaactctacctctttttttaagctcatcaccattttaaaactgtgatgaaggtgccactgatctgctgctttaggccccggcgcctcagtagtgttccttccaaaacacctgaacagcatgaacgcaccgggccccacactaagggatgacacaaaggcccattgcattctagtgtagatctgcctggagggctgatggcgggagggctgagggatggagggctgatgggaggagggctgatgggaggagggctgatagcaggagggctgatgggaggagggctgatggcgggagggctgatggcaggagggctgatggcgggagggctgatggcaggagggctgatggcgggagggctgatggcaggagggctgatggagggagggctgatgggaggagggctgatggagggagggctgatggcaagagggctgatgggaggagggctgagggatggagggctggctggtgtcttcggagatgagacattctcagaacacccttgttagggaagcaaatattttcccttctccacagaaagaaaccaagattccctggagaaatagctgattctagggatgaggtagggaaaacatcagatgaacctggggtatattgtgacaaaaaaacaaggaagccctcaaaaaacgattgagacatgttagaaaaatgcaggagccagttttgaatgtgttcccactgcccaattctgggacaatgaacactaaaataaataatgatatttattaacagacagaatatttgtggaatgaaactagaatctaccaattcaccctcatataagtaattaaatgagggagaagggaaagggaacactctctcttccagcagaagaacaataagtgtagcggaaatgatggaattagaaaaatcaccgttttacaagcatcactgtaaattactcttccaagaatcatcaatggatgtcaaagccagtgggtgaaagtttgataagaaacagaatattcacaaggtcttaaaatattccttacaaatcacttattaattacaaaggggaaaatggtaactttatcgtggattaacctagtgaacaacaccttaagcaagtaattaaattatcaccaagaggacagactgataccatgactcctgatgatgtactgagaaggacagaacatgacttccgcaacattcctgcccaaaaagcagaatcgaaatctaaccacaaacccaaactgaggaaacatgctacaaaaaaagtggctcactcttcaaaaatgtgaaaaacatgaaaaacaaaggtcaaagaatcagtccagattaaaagagaccaaaaatacttgacaatgaatttcaatgtatgctcattagatcagatctcagaccgcccctcaaaaaaaaaaaaaaaaactaaaaaggacattgagacaattggtaaaattttaatatgaatcatggattagacagtagtatcaatgtttacagttcttgattttgataaatgtattgtggttatgtaggagaaagtctgtgttcttagaaatacacactaatatttatgaataaagaagcattagggccaggcggggtggctcacacctgtaatcccagcactttgggaggctgaggtaggtgggttacttgaggccaggagtttgagaccagcctggccaacatggcaagaccttgtctctactaaaaatacaaaaattagccaggcatggtggcacatgcttgccatcccagctactcaggaggctgaggcgtgagaattgcttgaacccgggaactggagtttgcagtgagttaagatggcgccactgcactccagcctgagtgactgtctcagaaaaaaaaaaaaaaaaaaaggcaagaggtccacagattactttcaaatggctcaaagaaaatgcatatgtgtgtggagcaagagagaataaatacatgtacacatgtgaatatgcagaaataataaagcattgggatattaacaataggtgaatttgagaaaaaagcattgtattattcttgtaacttttttgtgaaattggaaagttttaaaaattaggcaagctggaaaagaaaacttattcctggctatccaatgcatacaatcaataatcaaagctaatatttatagggtactgggcaccattctaagtgctttatatctattaatttattatcacaacaaccttaggagtctggtattcttattattcccattttacaggtgaggagactgaggcactgagaatttatggacttaccaaggtcacaaagctagcaagtgacagagccaagactcaaatgcagcagtttgggtcccaaagcttttgaacactgttagctgtctcttctcgcttacttgggcagaagacacgtgcttcagtagtagtgtccctttaatttctgagaggctaagtgatgatggtgggctcctggctgataaaggttctatcttagtcccaattccataactaagaccaggacaatgtctccaatagttcccattcagatgcaatttcctaggcaggcctaagatttaagagttgtgtctcttgttactgtgagttcaagaactaatacaataataggtaaagtcacagccctgcagggagcaaagggatggcaagaccactgacatggctaaacgcacatatacatggaccatatctaacacaccatttattgagcatttaccactcactgcactcaaatctttcaggatcacatatcataatcaccaagcacaatacagatctacacacctacatctggtcagctgttaacactgctgccaagctgaatacttcaacgttactgcgtgctttcccagttgcttcaggtacatgatctccaatccttaggacaactcaactttatgccagggtgtctattttacaggtaagaaaaccacagctctgaaatgtaaagggacttccccaatggcatccagctctttttttttttttttttttttttgagacggagtcttgctctgtcgcccaggctggagtgcagtggcacgatctcggctcactgcaacctctgccccctgagttcaagcaattcttctgcctcagactcccaagtagctgggattacaggtgcccgtcaccaagcctgactgatttttgaatttttcatagagatttggttttaccatgttggccagactggtctcaaactgacctcaggtgatctgcctgcctcggcctccaaaagtgctgggattacaggtgtgagccaccgcacctggctgcatccagctcttaagtggcaaagtcaggatttacacttgggtctggctctctccaaagcctgtgttcttccacattaaatggtattgaaggctggcaagcagatatcctgcagtggccactatagggaaaccagctggagagttggtttgttgttcgcaaggagttaagagcaaggctcagcactggctgcagaagagggagcagctacgggctgaggacagtgtttcagaaaccaggctttggcttcgccaagttggaaggacggaggatgctggcttctgggctaacaaaggtcttgccctctcaatcaagctattctagagctttgaaagaataacaaaataaatgcctgtaatgctctggccctcctgagactaggaagattgcagggcattcctccaaagcctaccttgtttgattccttcagtaatgcctctgattatggttcaagacccacctcaaaaaagcatcaaaacaaggaaaagactgaagtggagaatatatgtgtttttaaatgcccatgtgaaggtcaaggatttgtgtgctttgttttaggggaaaaaagatttttaaaattttattttctaaaaataaaaggctgctattaagccagttatatcatgtgttgcacaccgagggcccctctctccttgtacagcaaagcagccagccccggtaatgatttaggggagattaacaaatatgtcaatgtctattttctgcttaatttaaaagtggcgtctataaagatttttgacttctgaaccctgttctcctgaaagaaagaaggtaagaatgaggagggggataaagagtgattatcctatcattgatcgtttgtcaggagcatttcttattcactggactattgtaaaaagctaagctctcgatcaatgctgtaagctccctgtacaattaaatatcttgaaatggttttctttcttttctagccagattgcagggcctcagggattttaggaaagcaagttggtgtgtacacgtgtgtgagtgtgtttaagaatatgctacagagagaaaagtcattcttttctagaattctacattaggaaatggctgagtgggagtaaaaaggtaggtgctcccatcctttcctatccaaaataaaaagtccctatgcaagttgggaggactgcctgaagccaggatttcaagatcagcctggacaacaaagcaagaccctgtctctacaaacacacaaacacacacacacacacacacacacacacaaaatgccaagtgtggtagctcacacctgtaatctcagaactttgggaagccaaggtgggaggatggcttgagcccaggggttcaataccagcctgggcaacagagcgagaccctgtctttcctcctgcatgccccccaaaattagccaggcatggtgaagcgtgcctgtagtcccagagatactctggtggctgaggcaggaggatcgctggagcccaggagttcaagctgcggtgaactatgattgtgctgctgcactccagcctaggtcaggagtgtccaatcttttggcttccttgggccacattggaagaagaagaattatcttgggccacacataaaatacactaacgatagccaatgagctggaaaagaaattgtaaaaaaaatctcgtaatgttttaagaaagtttacaaatttgtgttgggccacatgtggcctgcaggccacggttggacaagtttggcttaggtgaaagagggtgaccttgtctcttaaaaaataagtccccatgaaatcctaaaaatgcacacttttaattaaaaaatttaaagagttaaacagagacgaaatatcactggtcaaataagaagagctaacactattgagatgttactgtgtgctggtactgttaaagtactttttatctcatttaatccttacaacaatcctaaaagatgaggaaactgaggcacaaaaaagtaactcacccaaggccacaaagctaggcaacagtggagttgtgattttggactaggtaatctggtttaagagcccatgctccttaaacaaagcagttcaaattgacttgaaagtatccgcagcacagtggcctatcaggtgttccctggagccaggatacaaagaaaagccacatttctcctccatggtatcaaaggtgaagagaggctggacacggtgggtcatgcctgtaatatcagcactttgagaggccaaggtgggaaggactgcggaggccaggagtttgagaccagcccaggcaacacagggaaattctgtctctacaaatattttaaaattagcggaatgtggtggcgcatgccttgtagtcctagctacttgggactgaggtgggagaattgcttgagcctgacaggtcgaggtgtggtgagctgtgatcatgacactgcactccaggctggcagacagagtgagaatctgtctctgaccgaaaaaaaaaaaaaaaaaaaaaagctaaagagaaactcccagaggaaacggctgatttctgcagcaggaggcaattttttgcccagccatatcacttaaataggccaggagaaggtcagccctagtctgtgtatgaacaaactacatcctaaaagtaggatttgggggaggtgacatcttcaaagcttggaataaaaatcagactggtagactaaaaattctctgctcagccaaaggctctaggcgaccttgtagaaatctttttccttttctgagttgagttcctcatttatgtaacaacaatcccagtctggcaaacagggaaaatgttttataaaagaatgtgatattaaagtgtttttaaaaacattctcaacttttaaaaaagttatacttggtggcaggcacctgtaatctcagctacttgggaggctgaggcaggagaatcgcttgaactcgggaggcagaggttgcagtgagccaaaatcacgccactgcactccagcccaggcgacagtgcgaggctccatctcaaaaacaaaaacaaaaccaaaacagttatactaagaagcctatgtaaatttaaatccaattttaactttgatgggcccttcttcctttacttaagaaagcaatttgcgccaggcacggtggctcatgcctgtaatcccaacactttaggaggccgaggcgggcggatcacctgaggtcgggagttcaagaccatcctggccaacataaagaaaccccatctctgctaaaaatacaaaattagtcgggcatggtggtgcatgcctataatcctagctactcaggaggctgaggtaggagaactgcttgaacccgggaggcagaggttgcagtgagccgtgatcgtgccattgcactccagcctgggcaacaagagcgaaactctgtctcaaaaaaaaaaaaaaaagaaagaaagaaagaaagcaatttgctttgaatggttcaatacttatgatgctagagataagaacaagaccaccctccccagaaagctcctgaatatctcagatgttaaaacatactcccatccctcaaccttgagactgaaaaatcagcataaaaaagactggaatcttattaagattcagaagtacaaacacaagcagttgtttaaaagatctatgtaatcacattttctatgttgaaagaaatttttctataaacatagtaagataggtaaaaaaaaaaaatcctgcaaaactatttctatatccataacaggtgtgcctttctttacacaaaagcattcttgaaaaactgcgtaaatcagatcctgttttaaatgccttaagggagctattttatgaggaaccctgcagtgaatcctttggtaaggcaaataatccttttgtaatgggaataatttctcccaatgtatctagctttttttaaaaccccattttcatatatctgcttttcttcaaagggggccatacctatctaaatacactcacatttgcatattgattttaacagcaatcctctcaggggatgtttaaccctaaagttccctgcaacagtgttagtgctctactgttcatatttttaaaaatcattatattaatagaaaacccagagatttccaaacaggaataaaaaaaaatactgctcccccatcagtcccgtccctgtgtttccacgcagacatatccatataaaaaaggtcagggaacagcacagaattctctgaattcttctggtagaaatatgcctctgtagtcttcattattttccttccctaatttgctctccctatgtctggcaggtcaggatacggggatctggtcatttgggaccaagacacattctgatgacagctttctcttgggttccctctaactaaatgcctgccaggtccctctggccatacagaattgtgaaacactgcttccttgggggaggcaagcccaggtgcttttataaatacaatcagattaaaggatcaaactaaaatgacccctttctcttctcagaaaattttgtcactattgcactaaacttcaccgagccaaatagcttctgaatcagtgtgaggggtaggttttcagctactgctaacaaaagagaggaggcaagatcccatatctaccttcgtgatagaaagcctcgtgttatttctcatcagcctccttaccgcaaaggacacagtggccatagtgtcagtgaggacactccaagttcaacaggtgagaggtgaaagaccactcactaaggcatgcgtatcggaacttctttctttcctagtcttaactttccaggcaaagacatactttctgcctcaaacaagcaactctggctcttttcagctttcagcctctcgaagatggacataagagttggaaaaacacagctcagatactttgatcacctctgccagaaaagcagcttaacccttaagtccccttagcccagggaacagtccttttcctgtcattctggctgctagagaaggcttgggaggaaggcattcctgaagatttttacagagaagcgtatcctcacctgccaccacaatgctccatatctgcacctggggcaaccttgaccctgaaggcatggtgggtgtgggcaggcctagaaggaccaggcaagggccagcagcagtgctcactcagtccatgctgctgctccctgtggcaggcagtcagggcatgttctgtgtgggcgcagtgcggtgctgcatggcaggctgcccagctgcctgggaacagggccacaactaagaacaagttcccctaagcggctcctttgcccaggtgctcttcattttgagagagagggacagtggggaacttacaattgcttcacacttgggctggacagttctctctccatctaaattgatttgtcatttctctctgaacacaagaggaggggaaggatccaggagaggacctcaggtcacagcactcaagaggccaggctagcaaggccgtcccgctccacagccactctccctgctcctggccttgtgaggcagtagaaggatgtcagagagagacaaaaaggacttggagggctgcggctccatttccagagaagaaatttaatttccttaaggcaaccaaatggtaggaagtaattctcctccttgcaatgactctaccaagccctggttctgtgaatcagggtcagaactgattcagcaatgcaagactctggggcctgggctttgctcacttttctttctgaggtaattcttccctttacttctattaggaatcagtgtaggcactatttacatattttctgttataatcacagacctgcaaactagtaattcaccatctttccacccaaactaaccatgtaagatgacaaaaggccatttaaaaaaataaaaattctagaagagatgaagttagctgctcagaagtcaaatattactcattcttataaaatacatagcaattatgattttttttttttttaaagacagggatttgctcttcttgcccaggctggagtgcaatggcgcgatctcggctcactgcaacctccacctcccaggttcaagcgattctcctgcctcagcctcctgagtagctgggactacaggcatgcaccaccatgcccggctaattttgtatttttagtagagacggggtttctccatgttggtcaggctggtcttgaactcccaacctcaggtgatctgcctgcctcctcctcctaaagtgctgggattacaggcgtgagccaccgtgcccggagtaattatgtttttgaacacagtcaatcagttgtgcgctggtttgtctaagtgatctgtgagcacgctccccagtaaagaggcagatttggggagagaacggcaacacaagataacatccactcctacaggctttctcctaaatcagattttctctgtggaaatggctttagattacaaaaggaaagaatccttgtttaatttagttcgggctcagtattcagttgaggaaaaatctgaagaaatcctgagaaaaggagaacacagagaatgagaattccattctggactctgatgtacatttatttattttgtatcttagatgattcacttttttggcctcaatttcccagtctgaaaaatgagaccattttcacccactttgtgaaaaagaattttggtagtttggttctaggcaaactaaaagagccagaatcattgtgaaccccaaaggaactgggttcataatatgtcctgttatatctaggctgacctgctttgtcgcagagacagctgcccgtataggatatccctgagagacaggactatacttctgtttctttcatattttcacatgtgggactgagccacagagaatactggataccaaacatggccatctgctttttctaatgattaagacagaaagataatgatgcaatgaagtaaatgcatgctcatctgctcctcatattagctaggcagaggtgtgatctccactttatggttggaaaaaaactgatgttcggagaagttaaataatttacaagactcgtagttcgttattcttattccaagtccactgctcatgttcccaagctgccctaggccagagcctgcttcacatttagcagactaagggtcctttttcaagtgccattttggtcaaggttaaataaatatggttttctccaatgcggataggaaattgataatgagatgatttgtaacaaatgattaaacggctatcacttgggagtctcctccctctccccttcatgtgcttcaaaagttaaaaggtgctggttgaaggtgggagcgacatcactttccttgaagagaaagaagctttatctccacacccctcaccatccagtccttctgcaaaaggagaaaggatccctctccctaccacccagttactctgaagggatgataacagccattggggggttaaaaagaggcagtgaacccccagttaatgagtaggaattcagcaggcagtgtaagataaatggagctctctctgcttctgctagagtcagcatgaactgcggccctgcggcttgtttgtggcaaatggagtgcgcgaaatatcaaagggcagtgatccagaagaagaccgactttgacaaattttaaattggccagaaagaaaaccagcaaaaagaaaaaaaaaagggaaaagaaaaaggaagaaaaaaaggaaaaaggaaaatgatgcaatttgctgtgtcctgcaattgcggcattgctgcctttgtatggaattagtggtaaacacagcggcaacaattgggggatgctgggagcaattatgagccatctaagtgagatgcttatcagtggctgaagcttttagagctctctctatgaacagttgtaagtaacttgctcttgagctgcagttactttaattaaagtgtacagggttggtcagaagtaattattctgtttggaaaagaaagagaaaaaacccacctcaattctgggtggcaatagattttagaaacaactctcatttcttgtatgtgtgcattccccataaaaggatcagactgtggtgagttagagttattggtggctgttacccagtggcaaacaatgggacacaaacagggtttcttgtaacccaagtcaccgtgtttggcaggcaacctggctcagggctccaaatgcctggatgtacagtctccacagtgtaggcaaacgggatttttctgtctctggatggtggggatatacagtccacaaatggtactttattaattaaattaccacttggaacataaatgagctagcatctctcttctccattcactgagtttcactaccttttaaaggcaatctctgttcctttagaaaaaaacaaaaacaagacaaaccaactgacaaaagaacctcgagcaattatctttactaacatagcaaggggctcaatgggagacctgggcagaaaatcagtgttttaaaagaatctgaaactcatttagactctggactcaacacaggactcccatggtttagtcctatgttcaaattgccaagtggcttccaaaagctctgaaaacaaatgagcaacagagcaatggctggaagcattaagcacgcctgctctcagggctattctggctgcagctactgtttggaagcacacagtgcgcaatctttacttctatttctctagctcaggaagaccccggaacaccacctgggtaaagactcctgcttttctatcccatctctcagaaatgaagtgagctgtccaaagaaacaagcagaaacaggacatatttaaatctagcatattctctggtgaggcctgcccccagcagcaactctagctaatcattctctacaaggacatcttagaaagacgggctttttgtactctaaggaaatatcaggaaaaaaaatcaggtgacttttgcttttttagggctcactttccctattatacacactatttcattctaccagggttcttaccatatagaggacagtaaataaagattatcatgaatttgatcaaatgcttcagtgcctcctcccctggcctatgaatgcactcattacaaatcagctgaatggctcattgatttgccagaaggacaagcagacatacccaatcgctcagccaagtggatgtagactgggtccacccgacgcatggttttcaccagatcctttctgcggaatttgatttctactgtcccttctggctccagaacagatcccctggatcagaaagaaagaaaaaacaaaacagaaatagaggcactttaaaggaaggagacaacagaatgaggccagttacaatttgtagaccaggaaatagcttcattatcattttgcccacctatggttaacagacatctccccggggagaacagtaggcaccagagaagtgtctaagtgaggtatgagaaaggcctggcaaaaagcaattaaaataattctcattaccacaccagtcgacttccatttcaaagggagaagaatacagattccaccacctacagctgataagagtaacaggaatcacattattttccaggggaaaaaaatgctgtaggcacagtgacaggggaaccacctccatcacgtaggatgtacaataatgaagggcaatacttcatcaatactatctatctatctatctatctatctatctatctacctcacctataccacagctgtcagtctgcttgtaggacactgatcagacacactaagccaggccaagtaggaggtaaaacattctgcccagcgctatggaaatgagcagagtcaaaggtctcagggttacttttagtgcatactaatgatgttcagtccccagaaactttaccccaaacatgtttaaaaaaaaacccacagctttctagtttaaaaaaattatagataatgtttactatgtacatggcactgttctaataacttacatataaatccttacaacaatcctatgcccagtctccatctactatgtagtaaggttctgtgattattcccattttacaggtgaggaaactacagtttagtaagttatgagactcgtccaaatataacaagaggcagaactggatttgaaaccagacagtctgattccaaagtctatagaggaattgtctctgatctgatatcagatgagtttaggacttaaaaaataataaacccctaagtacagaatgtaaataataagcctctcagcctagaggtttgacagtgaaactactggactctcctaagcagcctttgacatagaaggctgaatctggggggacaagagagaagcgggcggtccactaaaacgactggaggtaagaatttccttggaaaatgtcaaagaaacacgttttgaagtttacttaggaaagaggtgagaacagactatgaaaggatgccagattagatctgttttatttaggtagtttcaggtaccacctcccaataagcctgaggttctcccttacagtttttttgggtgctacaaacaccatggtcttcagcttcctgaaatgctagagtgaggacctggactgtaatggaaggaaaaagctttggtttggaatcacaggatgtgggtgctgtagtgccatggctgtaacattctccaggaggaaaccaacagctacagggtccctaaaggcagtgaatggaaatgtggaaggcacgctacctgctttctcggtcagcatacatctccatgtgccgggggttgatggaggagtcaatcaccacccaggagccaccccgcagctcagcctggggaggaatgtaaaccagcacaggctggcagcactccctcaagccatccacaatgtaagcaccaaacttcagcacttggtcgtacatatctatggagaatgagacaaattagaaatcaagaaatttctcttcctcaaagcagtacttttaaacactgttcaggacctctggccacgaagagcctccttatactatgcctcctgtttggccaccctatagactaaagggagtatcgacctgtatcccattcaagactccagaggatcttcaaaagcacaagacagcaacagagagatgcactgtctttcacaagatacagtgtgtaagtcttccagattgcctttccattttatatcctctctgaatttctgtactcacgtttcaccacattaattcacatttgctctacaaacgttgagtatttttcatgtcaatatgtgctctcccactacagtaagtttactaaaggaaggaactattctacctcttttcagttattctcatgatgcttagcataggatgagctcttcaaatgtgcacctaatggaaattgatcctttaaaaattttatcttcaaaaactatttttcatcttggtatcccgatatccctgcccagtgcctgaacatagttagtgctcaacaaatatctgctgaatgaatgaatgctgaataaattagttatatactctggaaagaatataatgagaaagaaagacaaattctttaacagttgcatttttatagggtatcaatgagagaaaaattttaaaaatacttaggaaataccacacagccacatgagaagaacagacccaaccagggcagcatagtgagaacctgtctctacaaataataaaaaattagctgggcatggtggtgcatgcctgcagtcccagtcacttggctgaggtgggaggatcacttgagcccaagaggtcgaggctgcagtgagccatgatcttgccactgcactctagcctgggtgacagaacaagaccctgtctcaaaaacaacataaaacaaaataaacaaaaaacaagagaggaaccacctcttcattctgctaaagactacactttgtagactgggaatggtagctcacacctataatcacagctccttgggaggctgaggtgggaggaccgcttgagcccaggagttcaagaccaacagagagagaccctatctctacaaaaaccaaaaaaattagcaaaacatggtggcacattcccatagtcccagcaacccaggagggtgaggtgggaggatctgagcctaggaggctgagacctgcagtgagctgtgatcatgctgctgtactccagtgtgggtaacacagcaaggccctgcctttaaaaaaaaaaaaaaaaaaaaaagagtacattttgtaatccctccaaagccaggagcagcctgaagaaaaggacccatgatgtacacataaagtgagtccctggaaaactggatcagttatttatttcccaactttttatggacttcccatttcccagctcactgaagtccattgctaaagctttaggtttatgagtccagatgtttaatgagtacttcagtggagccacaatggatcctttctaaataccaaataacaggttcaactgagatcaaactttcttatcaaagagaggatctcaatttggaataaatcaattctgggaatccaaggcaaagaagcatttttcaggaagttaagagcaaaccaaatagaaattgctttcattgtagttactggcaaattaaactgccaccttctccaaagtaaaaatggcttaatatacaaactatcagtgagcacagttcactgcaaggcacatgctccactgccccaacctggtgtgtctgtgaagacttcagaaattccaagttaccccagaaaacaccccctactctatgtggaatgtgtatgatatgtactccatgtatatgatcagagtgaagacatttattcctttgggagaaaagctaagaccaaaaaaatttactgctaattacacaactgctgtatgaagagcagggaataaaggactttaagtgctttacgctaattctgtagttatgaaaataattgctcagttcaaattattttaactaaattaattctttagtggatatttcaaccagtgctacataataaaataattgtgtaattagcagtacatttttcagtgctgccaagagtacagtctccgaacaagtaacagaaaagtgtccctcaatgatatcatacaaagagaggaaatgaaaggtatagataaaaggagaaaataaagcaataaaagacagcacaaaaagtcattctacctgaaaaagaaaaaaaaagttagaggtaagtgaagacaaagtttccagctcttttactcacttcttcttgttaaagacttagctacaacaaaatctatctctgtattataattaacagattgacatctcaaaaagaaggggagattttatttaaaatgtattttcattcatctattaaaaaaatactagatttcatagtatatgcaaacagtttcaaatgaagatgagtgtgtgtgtgtgatttttaattttatgaaatggacgtgggctcctttttgtcatcatcatggctagcttattgtgtaccagggaacatgattatatatacacacatataaatcatttaatcatcagaacattatcttatttatatatccaagttgcaggtgagtaaactgaggcttaaataagagtgagtggtggagataagactcaaatctagatcttgttggccctaatgtccacattctactacttcattcttttttttttttgaggtggggagcggggcgcgccaggttctcactctgtctcccaagctggagtgcagtggcacgacctcagctgactgcaacctctgcctcctgggttcagacgatcctcctccatcaacaccccaagtaactgagactacaggtgcgtgccaccatgcgcagctaatttttgtattttttgtagagacggggtttcaccacgttgcccagactggtctcgctgagctcaagccatccgcccacctcggccttccaaaatgttgggattacaggtgtaagcctctgtgcccagcctctactacttcattcttactgctaggagagacagcatgagactggggtactctgctttccaacatctaatatgatgagtaaaataaaaccagaaaaagagacttgaatacatgactgaatattcccaactgctgctggatttcctctgtgttcagaaatgttcaaaactatactgataacactaccagcctgtgtgaggcttggatctgactgccaaacaagtatttttcggccccaagactgtgagtaggaaaggagcatcagggtttgttaaagctgacatgtttgggactaatatattgcctccatctaacttggaacacctatagacccacagcccaaccatcaaaacacccaaaaagcaggctattaaaatataaacaaacacacaaataaactctgtaatcgacatgctcagactgaactgcagctgccccaaaccacttattttgaaaggcaggttgaaacacttggcaacaatctgacacacaattgtctgaaatcccttcgtatttaagagacagagcaaaagcacagccaatagcagcaggggaggggcgatccccaagggtttaggttagaaatcagtctacagaattttaaagctatgcacgtgctgtcaattctcaggccctgagaaacgcaactgggaatggaaaatactgataggttcctcactggagaggcgggagcttggagttttctagcatgctgggcaaagcacatctgcatgaatggtgaccacacacaacctttgcagtgtgctctcagcacctaggcaccaaccctgcctagggcttttattgttataaacatggataaaccgtggcagccatgtgtatcaaacaagggaacagggtggcagagtgtttccacagtgtcccacactcttgaaaatgaaacagatcttattggcttgggcaagattatctgttagaaactgaaggtaaacattagccatacacaagctacatatacataatgtctctccttagttcattatgatcggctgacactgtatttcaacatcctagtaatcagagactttaaaatagactttcattccagttaaagttttcaataaattttttttattgttatttataacctgtcccaggaaaaaataataagtataacatgaaaagccaactgagagtgaccctgtagcaccagcagtgaggcagcttaatatcactgggatttgcatcctatcaagctattcatgctgaggctgggaccctggtgctaatttctagtaaatttcacgcttgatgtctccctgttgtgggtcattgccggttcgtctaaataaactgcttccaaatggctcttccatctaaatattcagccagtttttataatttaattttgcattatgctgaatagccttccggccagatagagctcattgaaaaaaagcaccaataccatcttgacatgcttttatttatttatttatatctttactgctcgaattagacctcctaggccgactagtagagttttttttttttcccttcactaatgtcaattttcagcatagcaagagctgtctctaatcttttcctactcattacacacaattttggagtcattttacccacagtgcagtcggctcctggctgtgtgtttgtgtgcactgagggatggcataattgtttattttccctccctgcataatccccagccagtattgaaaccaaaactgcaaacatctccccaagggatgtgaagaatgacaagaggccctcagtttaggtccctttacatgagataatacaacaccctgacctgtatgtaaatatgaaaggcactgttcctccccctcctaccttcacagggatctctatcttccctaagtcttatttgtcttacgtgaggtgtaaaaggatgcatcagcaccaaaattaagacagaacttgccctggtctatatatcaggccaaaaactcatttcagaccaagggcagcagggagaaaggaatgggtacttattgtttaaggggtatagagtttatgttgaggatgatgaagttttgggtgtagataccagtgatagttacacaacactgtgaatgtatttagtgccactgaattgtacacttacaaataattaaagtgataaatattatgtatattttaccacaataaaaaatgaactcatttctgagctcttgaaatttcttttcacaataaccaaggacatccccaaagtagaggggaagtaggtggataataactttttcaggaaccttgacattctgttatagggatattctagtagatctagttctggttttaggctctaactgtgttacagggagctacatcacatcagccaactgtgttacaggaagtcagacagatccaccttcctttcccaactctgccattttgtagctgaatgagcttgggaaatttacttaacctaatttacataaatcttaatttatgtaaaatgttcataacaatataacctaccccttagaggtgcttgttgtgatgattatgtaagataatacatgtaaaattgttagcacaagtttctggtgaaaagagctcaatgaatcttaattgttgttgttcttactgttacagcgcggcagccaatctgggcctgagccaaaatatgtagcagaattgaagcttttcctagaagtggcacattggaaacttttgaactctgaactcccgttaggataaaatatccagggtgacactctgaagtaatgtcaggaagagtacattctcagtgggccccccacaaagagataagtaaggagtaatagcatagcattctctcccaggtctcaacaaaaatattagagccaaggaatttgggatcaagtgaaatctaatgctgaatgaacctcatatatatgaatgaggggttttcaggccccccttccctttgatatactactaccatcttcttttgaatatcctggtattttgtttatacattatggctttatcattttgctcaagacatttttcttgtctctgtgaagcaatgtattgtttctgacttattttgacttatttttgttctctgaagtggctagcatagttcctaacacacagaactcaataaaaatgtgtaggattgacttaaccgtatactctcaatttctcatggtatttccactaatttattatctcggtcaaaaaataattcaccttgataatctaaaaaatatatacaatcattaatttggatatatagtccaagtctcccccaagaaaagtataaaatgtggtagttctccagcaaatacaggcaaaggtaaacttttcaaccaaacacacacacacacacacacacacacacacacacacacacacacacacacacaatcaacctagtcaacattttgccaaggaggcctggccatacagggctcttcctagacgagtaaggaaaaattgtcggcaaaaatttcaaatccctcttgccacataactgaccatctggtagtttccccaggcatttcctccctcataggctgggggtgcttctgccctaagctatttttaagtgccctattgagagttcattgtttcacattttgtatgtcttaagtattttcttttctttttctttctttctttttttttttttttgagatggagtcttgctctgtcgcccaggctggagtgcagtggtgcaatctcggctcactgcaacctctgcctcctgggttcaagtgattctcctgcctcagcctcccaagtagctagggattataggcatgcaccaccccatctggctaattttgtattttttgtagagacagggtttcactatgttggacaggctggtctcaaactcctgacctcaggtgatccacccacctcggcctcccaaagtgctgggattacaggcgtgagccaccgcgcctggccatcctaagcattttctaatcactatttactccaaaagtttctactcctccctccttcccctaacctatcctactgttttttccttttttttgagacagagtcttacccttttgcccaggctaaagtgcagtggcacaatcttggctcactgcaatctctgcctcccaggttcaagtgattctcctgcctcagcctcccgggtagctgggactacaagcgcccaccaccacgccagctaagttttgtattttagcagagacaaggtttcaccatgttgaccaggatggtctcaaactcctggacctcaagtgatccacctgcctcagcctcccaaagtgctgggattacaggcgtgagccaccccgcctggccctatcctattgctttagaaccccaaattctccccaagacagatggaatttatacttagcatactctcataccctccaggtatgcagtctctggcttagcatggccatgaattatctggccatgggacagagggcttcactactgtaagaggtagtgtttcctttggctctccctgtagtgtccacagtcgctctacacatcaaggtttctccgtaaatggtgatactggctgcctaattacttagcaattcccatagcatggagtagagcctttgtaataatggtctaatatgctggagccacaggcccagggctgttgttagataataatataacatagcacaaattgccactggtactgaacagcctctggtactgaatttgttcattttcttccagtaaatgctaatttcagtatctgtcttggtcactgtagaacattaggagtaacaccaacaaagtatatgcccagaaaagagggacagagtcacaatcatatttccccagcaccatcagaatggtccagcatccatctgtgagagcgagatccacaacagtaggtcacctcaataacactagtagtagattattctgaaattctgtatggaattataaaatgtacttttttccattcaagttgcaactcaaaagatgtctcagagagggcagaatccccaaaaagcctaggctattaggacacccacagattctgctgaatctataccctccctctgccgcagagtgcccagtaatcagtgatgcccctccagcccacaggcagcccagtcacctttcattccaccagagaagcctctccagttggcaaagaccatcagaggcagcccttcccggttgaagtccttgatggcctgatacgtcttaaacgcagaatctgggaaccaaacctggccagcctgctggattatctattaggaaaagtcaaagaagacacaattaacaacacagctccagggggaaatctctccaaggtgaacaagattttacttatttaaaactgaaaactaaaaatcagatcaacaaaaactattgttcatcaagatcatcatgtttggagtaaaaaagaagaaaggatcctcgatctttgaccttgtcaaatactattctttttaagtcctgattataataactctgtagtcaaaagggaagaatgcagtcctaagaacccttgttctaggtttctcaaaagctacttaaaatggctccattgtgctactctttaaagcaagtcaattgtacatagtctcccagtcctttcacctttgtgcttagtatagcattttcctgtactgtggctaacaaatagacaattgacgtcacactgctgaatagcctcctccctggcctccctgacccctcactttctgaatggtgtcaggatgtgaaaatataatccatcctttaaaaaaataatggcaccaggcacagtggctcatcccaacactttgggaggctgaggcgggaggatcccttgagcccaggaggtcaaggctgcagtgagtcaaaatcacaccactgcactccagcctgggccatgaaccatgtctcaaaaaaaagggctgtggtgttcacgcttggcattagggcagacttcaccgttaactctagctgtagctcttccatgtgtatactcagagaataggggaccaaagagccttcagtattatctcagctacctttctgtaagaccatctccccaacaaaagtatacgttttctagcatcaagaagactactgtaaagacttatttaatttttgaggcagaatttagcttctagtccgtttagactcaccttaaaagtgagcacatgatgttctaaaatcattcaaggctgctgatgcccttccctctaaaactgatggtttgcaatgttcctgatgtattcacaggcactgcgaagagaaaaaccctccaagcacagcccccagtgtacttgaggtggcctaccttggcttcagaatccaggtttgctggatcagctgggatacttagttctactgttcgggtttctacagcaacaactcccacaggtattcctcctagcctgataaaacatgagtcacataagaacccaatgtatgtcaacattatagctagccatttgttttccaatcccaaatcaagacattggggaaaaaactagaaacaaacacagagagcaggggaaatctgattcttctatgagttaaatgtgagactctacggatttgatatttactctctaaatatggtgggaaaccaccctcagaatcacttctattcggaaatgtcccaacacaagataaattcaaaccaagggctgttctaggggagcctctacatttagactcaacagcctagcacatatacacatccctacccctgtggctgctaaacgaaatttctcagttcactctagagcatctccttggtgaagatggtaggaaatggtctgaaaggcagtaggaatctgagactttcagtaacttttaatgaggactgaccttgctgaaatggagctgtagttttctatggaatattaataatgtggttccagataagatttgagggtacaataggtcttactattaggtgtgtggatagggagtatgtaggcatgttatgaggatgatgagaaacacatgccaagaatagggaagtggatcaacaagcccttaattttctccttccttggaaaagacaaatgggacaaggataatttttagtagtaatgctggtgaagtctatattagaattatatatttaatctcaaagctatgtttatttaaaaaactgtttaggagctcaaagcctctgcaccttatactccactatgacttcccaatttggtcctcataaagattttctaggaaaaatcagagagcaagacaaagtacagggtgagtctttactctggaaaatgtgatgcagtcttcattctcactgttgcattccttggggttggggctgggatgggttatagtctctcatttctcacagcatctccataacaaacttttccatgacagatggcctttggttgttaaattggctagtgaaaatggattcctgtcatcacaagagggctgacaagggcctgagtggagaccacccacccccttgtcacttgcctgcactgaatcagaatcaaaagccctctagacaaccagacaacgagcaggagatacacaggagggtttagaaatatttctgttcacaatgattaacaatccaactggaaacttgtaattgcaaaagccaccctaaatcggtaacttataacttatatattagggcccatgtgacctaataaagaacatctttatccaagtattacagttatttattgaacttgaaaacagctcagaacaacttctgttttctattatacttcatataaattttatcaggctagcacatgaagatgctacatcttgttttatagtgtgtccctggacaaggtgccatggaataataaaagacaatttacagccaatagcacacatattccaaacatacataccaaagatgagttttggcagcacttacagtaacaatcccagacgaatacatttatatttatttcttgaaatgccattgcttttgaaagaagctagagctccatttgtgttttatatacttgtgagtatgtgtatacgtttggagtaagaagcccagaactcgtcagatagaaagaaaggaggaagtcagagtgagtgttgcaataaacaatgacagagctaaccaaagccaagcttgactgatcttggtcgcaaagcaatccctattcttctaatcataagtgtaaagtatttttctcttatttcccatgggaggatcttaaagaacttaacaaaggtttggctttctgagacttaaaatctgtcatgttttttcacagacaggaaaattgaagcagaatagatgagacaaatctcaaaaaagttggtcttagtgtgccgtgaggaatctaacaagctgatacaggagtcgagtatcagggttctcgctccagtgtatctcctacttccaagctccccactgggaattttaccaggcacagagaatacttctcactgggactgagaagcctggggtgagataaaagacctgagactttaaagaaaacagacaggtaggctctgggacattcagtctgagctgactccaggccagaatcctattcagagtcacagaggaagaccctgtctgtgggatttgccctctgatggcttcttgtcacaggcagcatggaggcgtgctgacctgctgtactgagagaaccacagagcctagaattattttcaaggctagaatctaaatctcaacccaatgtggcatgtttgagaatcttgagcaggtgccacttttcaccaagataaggaaaactgattgcccccagaggaaggtgagctccagatgcggtccctcagcagcatgtctctgcagtgcagaagtagattaagatcagtcgtggcaggtgctcgttatagctcgttatagcaagcactacagattattttgcacagagcttgctgttgagtgaagcacttcttagagtaggtattaaaatttaatagaaacttcaatttcccacttcaaaaatataggtatcttggcaacctatttcagcttattttactcctgtttcaggtaaactttttttttttggcaattcacatctgattataatccaatatagtacatttgtcacttaaataatctcggtgccacgaagaacctctttccagttacatagaaaagcagatgagtctctgaatcacttgtcacctattcctgaaagaaaattgtctttgggagagggaaagtcattggtgggctctggctattgtagttgggctttacagctcccaaagtgtttttcctgaaacattataaaaaggaagtgttgtcaaaattagccttcagattaaacgcatcattggagtgacacacaaaatggcaactgagaaccagcactccaattattttgccttgggcatggctataatccaatattctcagacagttcagacaaagagaacattattggtatatatctatagagccatggctctttctttcttatttttagttgggaggaaaaagagctgccaaaacaaaagagctcttacctggctctaccaaccaccacagtctgtgcccagggctgcataatctctgagaaagatccatagtcaaaaaagccactcaaccactgacctttttgggctacagaagggaaagaaagaaaacagagaataaggacagtgaatccattgacaatgtgctggaactgacgaatttaaggtggtttgggggattattttggggagtttgttgtttttaaccaaattataatagatggaagcattaggcagctgaatgttcatctgccttcagacatcatctcctatttcatttgctagtctgcataaaaagaatcatttatcagcaaaagcatcatttattgttaaatgacaaggtttagctagcagagagagtttgcatgcttttaaataaataacttgactttcttcaagacactacaaacatttgtcaaaaggctgccaagtcattaaagatattttcaaaatgtctatttctattttaaaacttgccttacaattttgtttgattccactgactttcttttaactgaaggctaaaaacaaccaaacaataagtattaatgatcagataaggatccaaatttggagggaaaaataggaactcagtttctccgctacaaaagcaacaagatatatctactttattaaacagctgataaagtataacctttctacaaaaaagggccacatattcttgacagatagtaaaaatacaatggttaagatgcacatacttaatgccattaatcttccttgcacatagaatttccttcactggcaagacccaaaattttcaacatgttagtttaaaaaaaaaacttttgttccacaggtataaatgtttgaccaaagccccataaaagcttctgcaaataaccgtttcctagtttgccctctcagctcacggttttcagtgattcttctaatttgaacatggccctccaccccctaaaaacccaagtccaaaaccaattaaaagtggagatctgagcaagctaacctctgctgacttaaacaggatggagagtgttttatctagactaaacttgtaattactgtgttctacattccttgcctctatggccccagtgtaaaatgtgatcatccatttcaaaattatctctccatccgtgagcccaaagccgatcgtttagattctggtcttgtgttgggcgtcagtttgaagaatatcacagcactatctcctctaataaatgactttaacttttcacctagaagatatctgctttaacttatcacagggaatcatctgctttctttaacgcttccactaaattaaaatctgaagtcactcgatttgggagcgagtgttagctgcacatagacagcaggatgaattactagggagtcaatgaaaaaatattatccaaaaaacagaaaacttagtttatcaaaaatttcattttattctgtggatttcattaataatggccaggataatgcccacctacacacacatacttctgttcacccatgaaagaaggactcaaattttggtgaagtttctaaaccaaatttctaggttcatcagaacactgaattttaactttatatctttggatcattttctaattcttacttcaataacagggatttggaactacagaattaacttcaagatggaaatgttttcttctttaaaaactctcctgctaggggtaggaggagtcactgactattgtagttgtgcttcacagtccccagagagtagatcctacccagttccgatgcagaaccttagaagccggctaagatggcttcccgtatttcccaggaaaaaactcactaagtcttgttccaaattctagaagtaaagaggctcacttcattcccagaaaagtcctgcattttaagactgacaggtggccgggcgcggtggctcacgcctataatcccagcactttgagatcacaaggtcaagagataaagaccatcctggccaacatggtgaaaccccgtctctactaaaattacaaaaattagctgggtgtggtggcatgcacctttagtcccagctgcttaggaggctgaagcaggagaaccacttgaacctgggaggcggaggttgcagtgagccgagatcgcgccactgcactccagcctggcgacagagtgagactccgcctcaaaaaaaaaaaaaagaaaaagaaaaaaaaaaagactgacaggtaatcttaggctcatagttcttatcataatcatggcacaaaaaaaaggggaaagaaggggtaagtggaggcggaggttgcagtgagccgagatcatgccattgtactccagcctggaggacaagagtgaaactccatctcaaaaaaaaaaaaaaaaaaaaaaaaaaaaaacagtaggaagaagattagtatggtgactttccaggcatgtaaagaaaaactatttcgttttattaaaattaacaagaagaggcactgaagacaacaggtaaagttataaattaaaataaacacttctctcatgtttttatataatagaaagtctaatgtagatattgtagaaaaacaatgtaatagctatataatagctatgtgaccttgtacgaatcactcaacttctctgatttttgtaaaatagttatctctctttatctaagagaggtcgtaagtgcaaaaaagatgtggaagtgctttacagtcccacctggcttacagtgggtacccacaaaagtttattaggtcttccttatgaagacctctctttcagcaagatcacaatgacttttacacttaataaaataccttctgcaatctcttctacttttatatatagcctttctttgaaatagttgcaataaatatgcaaaaaagaacaaatgcttcctcacatagtttgaaaaaatggattcaaaatacagcagagggatttggtgctccacaaaagaacctcctgataagtaaggtttgctagaacagccaaatggactgacaaatgagaatgtacacagagttacttctttttcctgttttgtttctaagttaggtaaaagacaaagcagtagattagatatatctggagggagagcttattctcactccatgtatctatataattaaaagttctggacaatctcttcatgaataaatgaacttacaaagtagccttctattacttactaaagcaagtaccaataccattaccaatatcataagaagggcacatgcagcgtgggtgctcagagcttgctgagaagagtgaagtcatattctacactgaagggtctcaaagacgtgtgctaaaacgaaactgattaatctcttttggttgtagggattagatgactgaagattctagtcctataattttatgattttatggcttatattgaactgtgttaaagtctttgaacccattaagtaataagtgctttaataacagaataaacagaagaaatgtattcgtgactgcactgcttgacttaatgggtgattgggaaatgtcattttatttatttttcattttttcatgaaggatttcccacctttttcttcagagggctggttttcaggtctttctcatttctaggtacttacctctgttttcttagtcacatgtgattgttcaggaattggatagtgattgaaaagaacgctaaaagcttaagagccaggtaccatggggtcctcaaacatatacatacttgggtgaggacggcctgctagcatccatcgaggatcgtatggggtctttgtgggaacaaactcgatgattctgtctataggatcctttgagttcagaagaggaactgaactgtgcacgctctaaaaggagattggaagagagcacagcaatcagtgaacgacagccctagactccaactcagcaacaatagttatagacaaagacagcagggcccacgtatggaattgcacccaatagtcccaatcttcagctggaagaatcctacgtatgtgccaggccccaaggaacatgtataggtcaatagtctcatttaggaggctggcacaaagtggtgtgttttgactcttgatttcagtgtgcccatgctttctgggatgctcctctgaggaatgaatggctattacagaggagaaaacccacaatgaggaggaaccttaatatactgggatctgagccttaggtaggccatgagggcttccgtggctggaagacattagaaaggggcccaacaaatgaaatccagagacatcttaaaggtagaaggcaaaatatggctgtaaggaaaagagaaatcaatagctttcagagaaatattttataaaaaaattcctccaccataaagacaagaccttaaacacagaggcagtgagctgtggtggaaatgacaggctctgcaggccatgtcagtgctgggtaggaagggctcaccttgggcatgtaagacagccagtgcaggacagtgaaaaccccttcaaagtcatcacacacagtgcagtgggtcaccccattgttgtgcataatctggatgccccccagctggttattggaggtgtacacttcccgcccgaggacctagagaaaagagcaagagaaaagacatttgtctctatagaaataaaggcatggtcgatttcacaagtcgcactaaaatgggttcttttctccacaaaacagagatttcagtctccatgggttggttgttctgagggactatctgaatcttcttcctaaaaagaaaacttagaaaacaaaaaatatgagattgacgcgctgccagctgcgctaagagggcttactatagcattaggagatatacctaatgctaaatgacgagttaatgggtgcagcacaccaacgcggcacatgtatacatatgtaacaaacctgcacgttgtgcacatgtaccctaaaacttgaagtataataaaaataaaataaaaaattaaaaaaaaaacaaaaaatacttttaacaatcacattcatggttgcaattttaaaaccagcaagcccctttctctccaccagctgccacagataggcaaagcatacttccaccctcagctgaaactgcagtggtgggtgaggctgagacccagaggcataggctacctcattgtgtgcaagtctctttgcacacagacacaaaaaggtaacatgcctgtctttcaacaatatttagtgacaagtctcagttaaagaaactctgggggcttaggttcctcatttttaaaaaggattatttttttccttatatttgatttttattagattggtgcaaaagtaattgtggtttttgtcatttaatggcaaaaccacaattacttttgcaccagcctaacactggcctccacgcacaagccctaaagctagcaaaaacctgaagcaactcatgatacatacatgaacccctgagtctcaagtcttctttgtgtgctgggtgcagggctgtgatttatacccaagcatgcttcccctcctccttcccttcccaggctccagggagttcagggcctcaatccctggtatatccctggaggaatttaatccttgtaaggtcaaagggcacctgcaattggaaaccacaaagtttcctttaaagaagaaaaaaagaggaagaaaagatattcctggacttggaaattgcagggtttctttttcccttgaagactggttaataatttctttcagggaaggaggttttctgacccagcagatggaagccgggcagcctgatcactgactattgcaaactgctgagtgtatagtaattgtcagtcatctaaggtagccccggagagctctaaacagttgtagagcgcttactgtattttaccttttctttttcctttcctctcctcctttaaaaaataacgacaatacaaaatttcttccgtacgtgtattcattttcagtctctggggagaatctaactaactaagggccagcaaagtctgcctgtatattcccattttgccccttcttgttaggagctttgagaggttcccctgcatgctgggtcagcacccccatcgggaccttccaaagatggaggaagttggtgaccaaagtaataacctcagtgtgacccaattggccttgattccatttaacttcagctaggaagggcataagatacttttctgaaaggaatatggaaagcaaaattgctctcagattactgttttccttgataaggaagcgcagagaacaagcctttacaggcagccccaagctgagcaacatgctggcagctcctttgaaggagcctcgtgaagagggaagacggtatctgaccactgagctcccatccgcctctcagtccgtctttaatctcagcccaggcactgcggctcttttctcattctcctgctgtctctttccatttgccctctctctgactgatacactgatctctcggtcactcagctttctgctctgctgagtccatattactaataacacctccgccacggccagtttacctcatgaaggcaggagcacatcattacaaaataaactcataactttgacattctagcaaatacacgccgtttgttatttttatggctttagtctttctaacaggcagagggcattacatacctgtttcatttatatctttaaatgtgcacacacatgcacactcacacatgcatcaggaaacaaaacagaacaaaaaatccaaaccaaagcaaatatccaaagcagtctgttgatgcgggagcctggtagaggcagaaaccctgtcacttacagaggccacgctctgatctggctctggttttatggtcgtcataaacccgatggcccacaactggtccttctgggacagactgcctctctgttagaaggcattcagtgtgatcagcagtatttttaattattaaaataaaattggaaagggggaaaaggaatacaaaaggagacactgtgctgaccctgaaaatctgatattcacaatctaggtcaggagccaagtactccttgttgcccagaagagagagctgggccattttctactcagaaacactattttcttcctatctctaatacctgataatgtccaaccacttagaatcttacacatctccaaaactaataatggaccaatgaagaactacactcagaaaaagggaccgctcagctgtttaaacatactttcttctgatgtctttgcctcctcatttaaaagtgatcctctgccacttatctattctaccccatatttttacaaaataatgggaggcaaacttggtaggctcaataactgagtactcttctctttacaagctaaaactcgggttctgatgctttggcattgttctgaaaaggcagcagtatttctacatctctcctttcctatgtttagaagaaacctaaccagggcttaacataccaagaacattatttctgagctaaagaagtgtttgtcatgtgagaaaattcacttaattcagaaattaaggagaaaaattacagaatagactaagagtatcccaatatcactctctgaccagccttatcttgggagatggggggtagggtggggatgggcacagaaatgaaactgctccactaatcacaaacaaatgctaacaatcataactacttaacaatcggtgaagagaaagcagtaccctccagttcatcttcaatgaccacatgtttggagtatgcgccagtagaatgagggcgcacacaatagctcctgatttataggggtcgttgctgactcaagtggttttaatgattttagaatacttcacaacaaaagctccaaccaaggaagcagaatctgggttaggataaaatccattctgcctaactgtgaaatgatcatgctataacagttacacaaaccctcatcagtatctaggaagacgaatggagtccacatagacagaaccattgttttcttcctcaaggttgccctgctgaccttctacagaaaaacctggggtcaacaactctcatcaacatattttcatgaagtaggtgagctgcattcaacactcttttaaactttgacctacgcatttcttgccgtgtttcagttcccaaatatattcctcttacattctacttactgtatgatacaaacttttaatttatctgtccagcaagcatcaataatcatttaaacacaggagtgagtcaaacagaggtgattctcctgaggcctcactttcttgccctccagatctaagtggagaagcagtaccatgcaatattaggaatgggctccaccttggggtcctctgctgaagagtgccatgctgacagaattgaataagggctgaatctgagaggaaagaggatcttgactcattctcaatataaacttaagcctcatccagtacttcattcattgcagccggcggacctaagaattaagggcaccacataaaagccggtgattagcagagacacaattgttaaaggctccaccaaagatgctacgtagcctttagaaatgttgagatacataagaagtacaaatgaatgcagtcatacgtccatgctcaggcctctgctgctgctgctgcttatctagagacactgcagacagctcaggtttaccacagctgacaggcaatgaaaacagcctaatataccgcctgctctctcccttaaagccctttttggagatcaagataaacacgtacttcctttcccccatgctccagacgtttgactgaagtggcagagcattgtgatgttttgtgcaaatgaaatcactatgtaatactgaatgagtgcagtatttacttgtcaggatatttgtcagcacaggcattgagatttccaagtttcacagatgcaacttagctcaattttttaaaaattgcctttgtcctgacatacacattatgttggggacccttagacttataggcaaatatttgcaatcatgtgctgaagatgtgaaaaattatcatgcatatcaatgatggaataaaaaatgaaatctattccttctcttcctctttattcagtcttttccccctctttaaacaatgctcggtgggtcaggacatctatttaaggaagcagggaatacaaaattcctcctgcatctaagaattaggctacacaagctgagtcctcgctgcaatcctccttcttattaggacatttccattctcaagaggatttgaggaggggttttgtaaatttactgagtaattgtcatcactggacttcatccatgattctagatattaaagtcactctgggatctgtcaggttattgataaaggttggctaaagctgaaagagaacagatatgagaaagaataagcaggagtagaggaaaagtggtaaaatagggacaaaagaaagaaggaaggatgagagagaggaaaagggagggggagagaaaggaggaaggagaagaaaaaaatgcaatagctcatctactcagtgcagctaatatcctcctccctgacctgagaggactacattttaaaaatctgacaagtaattcaatctccaattaacaattttaagtggtgctgcacatatcactgtgtcaatgtttcttcaggaatatatccaagggtgaatggaattaaatctctagggagatggaaccaggacctatgtgaccaacaagattatttgggggttccaaaatacagtttcttaatgcataggcaaagcgttataattttttccccactttattgccactactgtcactggcaaactggagtgctggctggcaggtgctaggctagggttggggtagagaaggggctcggtgacatactgtgggcagaagagagaaaagcctctgacatgagccacagctggattcaagaccatttgctataagaccaaaaatctctctataagcagcaaatcatgaagtgatcaggtatgctgaaggataaactggggcaaaggggtggtactgtcagtggaaggaaaagaaacagccaaaaagaggctgaatataggccagaaataacactggaagacatctctttactgaggtacagggctcagtggagaacagaggaatgaattagacagcagaaagacaataaggatttgaaggtggagtgggtaaggaacagagactcatttgtaatgtaaaagatagagaggagccacacaatagtttgctaaatgtatgagaagaagcacaggcttctggaaagaaagctgccaaaagtaatcactcaccctagggggacccaccaactgctcatgtaggtagggacttgagatttctgataagttaattccaaacaggaattcttttttttttttttttgtagagacaaggtcttgcacgttgtctaggctggtatcgaagacctggcctcaagcaatcctctcgcctcagtttcccaaagtgctgggattacagacatgagccaccatgcccagccaatttttaaaaattttaaataaagtctggtttattgaagtataatttacatacagcaaaactgtccatcataaggtatacaagtctgtgaattttaatacacatagtcatataaccaccacaacaatcaagatagagagcattttcatcatcccaaagtctcctcatgttcccttccctccctccacccctaacaaccattgatctttttgttccagtagttttgccttttctagaatgttacataaatggagtcatacagtacatagccttttgaatctagcttctttcagttagcatattgcatctaagcctcattcatgctgatgcaggtatcagtagtttatttttattcctgagtaatattccattttatggaagtaccacaacttggtaacccgtttgcctgttggtgtacatttgggttgttttcacttttggaggattataaataacactgctatagacatttgtgtacaggttttaagaaaagcccaacctttttcaaagtggctgtgccattttgcattcccaccaacaatctatgagagttccagctgtcctgcatcctcatcaacacttggtatttgtcaaacattaaaaaaaaaccatttaggccaggcacagtggctcacacctgtaatcccagcactttgggaggcctaggcaggcagatcatgaggtaaggagattgagaccatcctggataacacggtgaaaccccatctctactaaaaatataaaaattagccggggcgtggtggcacatgcctgtagtccctagctacttgggaggctgaggcaggagaatcgcttgaacccgggaggtggaggttgcagtgagccaagattgcaccactgtactccagcctgagcgacagagcgagactccgtctcaaaaaaaaaaaaagcaaaaaacaaaaaacaaaacaaaaaacaccatttagtggtgtcaagctgtggtttaatcttcatttccctaatgactaatgataagcatcttttcatgtgcttatttaccatccttatattttctttggtgtaatgtctgttcaaatttcttgcccatgtttttaattactgggttgttttcttactgagtttgagaattcttttggataccaatcttttatcagattatgtattttctaaagatggaaaacttttaaaaaaatccctgtttgtcagtcgcctcctactggttttactgaataggctgtgactgactgcattgctcaccagtgtccaggccccaagagtatggtgtttgcagggcctcgctcttaggggagtagcactgacttactatctctgtggccttttggtttgtgttttctcattgacgtctgatgggcagcaattttattttttcctttagaacacatgaaaggcctattattgtcttttagctaaatttcagctccatgaaagcaggaatcatctttgtattgccacagcataagaacagctttatacctaacaggcatgcaataaatgcatgtgatctaccacatttctatgtattctataaaacctcaaccgattagtatgttcagcaagttaaaccactataagcaaaataagtctttcatattagtgttataatgtgtagtggctttctgaagcaaaaggagtggttcaattttcctacctttttagttttccccaatgtagatgcccctctccctccctccctgtcaaaattctttacatgggctaaaattaaactagtaattctaagtactataaagtcatattatgttaggaatgctcttctgagctgcataaacctgctttatctattgagaaaggcatattttaccaatgggtcaggtagaaaatgaagttactcaaaagttgattacatgttccaatggtcttgacttctcatatttgcatcttatgctgttggttaaatttgggtgggttcttttccttaccaacactgatttctcaatttcttagacgcgcatactattttagaaggcttaaatcccagacactgagacattattaaaattaggaaccggtcaaaaatcagccagaaaatcttgaagcccaggcatggtaatctgtagttcaatctaaaaagctctttaagcttctcctttcataattcaatattcctgactgtgtacattagctgattagactgtgtgatgatggccaatctgaatgagaagggacatagctagatttggatccatgcacagggaacattccctagaatgatgaacagctaggagtcaggtttctaaacagtctcatttccgcttctttatcatattcatagaccagtctgtgcacagccagggcccagctctgtcttccttctagaaaagactggagtccttgcatttctaatctactaacgtgtggttcttgcacttttaatttatgagtgttaagggggacctttctgacttgggaacatattggctcggtctaatgcttggagattattaaacttggagctatgctccactatcaagtctacagatcttttatttagaagatatggtgctctaaatgcacaaagagctccctgtcaccttcacattaaagcccctagtgcctggtaaatggaattatatagctgtcatctcctttccccaaagttgtaagagtacaatgggctcattttttcacactccatcccagcttcagaactaagagacctactttgtattgatttaaggtctcagaaataaataaacctgcttcaccactgtgattcacaacaaattcatgatacactattgcatgatatatttcaagctcttgctctggctctctttttcttctggtgagtaatgggggaggtgggaggtggtagggagctgcaaagctgacagcctgatggttattggagatggttgctgactgcaaatccaagaatagacactgttggaggagtacgggaatttttttacaactagggggcaggggtgataagctaatttacttgggcttcaggctggggttgggggagaagaaaggctgaagagaggagaggggttgacagagtagcaaagcttcaagtgagcactgatctgcaaagacagagctatgaatatatgtagaaagagagacaggtgaagaaaattcaacatatgaaggtgtaacacacaactgaatataaaatgaagaagacgaagaaaccaatcttcctaaggaaccgtgtgtacagagctaagtgggcccttagcttgagttcagagacaatgttttattagaaacagacagtgtagagaccctacatgccacccaaagtgtgaggtagaggcatttcttcattctaatactcaggacacatcagaaccctggaggtggaaatggacaatggatatagggtagagatataatgaaggtccacatggatgaagtgagccagagactgttcactgaggcaagagggtaatacattctagcagtttagcttgtgtttgtgtacccttggggtttgagtacctaagtctacatcacctttactgattccaccaaatcttaggcccaatgagttttagctggtatctacaaatatagcagtcaaaaagaaatatcctccaaccttatttcaggatctggactttcaacaaggcagaggaggagaaagcaggagataatcgggctccgaaggtactgcatggcactgcaggagacccctaaggttccaaggagtacttccaagtggaattaagttttaactgtttctcttgtttcttctacttatttcacatttttaactggcaaagttatttatgaatccaatttcttttctatcttggaatagcattttcatcttcactacatttgttcttgagacaagaccagactctgaacacaaaagtacatgagaaagattttggttccattcaatttccaattggtcatatcacaaaactgggagtttctttgttaaatttgaacactgtctttaaagagtgatcagtctctgtacagggaaacagactttagccaaatataaaaaagaattcacagatgaatacatagatgaatgggattggctccaaaagtactcagctcccattcagttgaatttttcacacataattgggtgaatatttagcaatggtgtcacagaggagattcacacaacaattgtgtggttgaacttttgaggatcctcccactctcaagatttataattctacagccacttgtgattgtgaacaacatatagtgtttacttttctgtaatctggataagaaacaaaattaaaaaaaattttaaatcatcatgctcttcaacttccattcctggtctcacgagtatgtaataattttatatatcactaatatgtaattttatatataataccctaatacgcaataactttaaaaattccccacctcctatctattcactccccagcctaaaacagttccctggctacagatcaatatgcatctttatagcatcacagaatactagatattgaacagaatttaagattaagagatcctctggtcttctacttaaaaaaaacaagcaaaccaaaaacaggcttaattcactttatttttcttatgtaaaaactctgtgttgtagccacagttggagcctgggtcccctgcatggagactctggtgtgggtcttgatgaggtggtcagtgaattcctgacaggaagacttgatgaatacagtctccttccagaggtcgggggtcaggtagctgtaggttttagagatggcatcaaagatggccttgagaaagttccctagggtggcagtgcagcccctggctgaggtgtagcagtcatcaatactggccatcatcagcagcttcttgggcaccagggccgagatgatgccagtgccccgggtgcagggatgaggcgcaccagcacagagccacagccacctgtcaccttgcaaggaatggtgtgggccttcttctcccagtagcctctgtgcatggggacaatgaagagcttggccaggatgatggccccatggatggcagtggccacctccctgaagtacttaacacccagaccaacatggccattgtagtccctgatggcaacaaacatcttgaacctgatgtgctggcaagcacgcgtctgcttctgcactggcataatcttcaaaacctcatccttgagagaggtccccacgaaaaagttagtgatctcagattccttgatgggcagggagaagagatagatctcctccagggacttgatcttcatgtccttgaccaggtggcccaacttggtcatccattccttgccctcagccttgcctccatgagctctgtggggcccaggccctgttcacggccatggtcccagccctggatgccactgccaaaggttccacggttccccatctcaggcacccccacacctggctaattttttaattattttgtagagggggtcttgcttcttgctatattggccagcctggtcttgaactcctggcctcaagccatcctccttccttggcctcccaaagtgcttggattataggattaccacgccaacctgattttctactttaaaatgggaaatgtattatgccttccatttcacaaagaggaaactaacatctaaatagattaaagcccaaagttgcttacctagtaaatgtcagggagaagaacaatcaaaagttttttgtttttttttttctgagatggagttttgctgtttttgcccaggctggagtgcaatggtgcaatcttggctcgctgccacctctgcctcccaggttcaagtgattctcctgcctcagcctcctgagtagctgggattacaggtgtgtgccaccacgcctggctaattttgtatttttagtagagacagggctttaccatgttggccaggctggtctcaaaccactgacctcaggtgatccgcctgcctctgcctcccaaagtgctgggattacaggcatgagccaccatgcctggccaagttttttttgtttttttttgtttttttttttttaatctaaaggttctgtaactccaaaaaatttgagcacattcataataggttgtcaaacatgataatttccgagtctgtattcaatgccccaaatagagtctcagagctttcactttatctagaagctctggactggtacttgctgtagggtctcccaaattcttagactctaagccaccatatatgcatgggctctcttagagtcagagacaacttctgcagtggagctctgtgtggcgattccaccctgcaagatctccaaaccagagcactcaggattgttggcaggtcactaaggcagactaatagagtcaaaacataacctggtatagttttctaccaaacttgaggaatattgaatgaaaaacaaacaaaataatccccccaaatggggccagatttaccaatattttatgtgtggggagggagcgcttgaaaattagggagatctgtccattgtgcaataatttctgagaattcattcataatgctaaagcaaggattactcagaaaggaagctaaaatgccctctttagaaaggagagtgatcccatctggagctatgggagtacagggactgtctattgtgaaaataggtagttagggacttttaaaaatgcaaattgctagactgatccttagagtgattatgagctattgtatcaacgagtccttggggactcttgtagacagatgactgacatatatactaccctgtcacgactgaacatcgtgcctctcacattaatggctttccaaagtgcgttgattgttgctagatacatctattgggaaagtcaatacatgaatgtactgccacagtgaggactgtcatctaacattttcttgaagaaatttttgccttcaaagaatcagaaagtatagagaataatgtgttcgtatttcctttccagaaccaggataagaaattgcaatgagaaggaaccctaaatgaaccttagagaagactatggcagtgccaatgttttacctattttggctcatttaattctcacagcgactctggtacacagatactattattactcatcttttacagttaataaaactgtagcccagagaggttaaataaattgcccgaggtcacacaactaagtaggtggtagagccaagaattaaacctgggcagcctggctctagcctctccatgctcataacatcttttttttttttttaactaataaaaaaattgtaatttacttagaagcattcagaatgccaacaaaacagctgcaactttttttttttttttgcaattacagagtggtattcagttaacagaacaattgtttcatataagctgcatcagagacaattgaaaatgaaaaaactaccaaccccatatataacttacatgtgctgtgcaccaataagaacctgcttaaaatttttatgccaatttacaacccccatcctgtaccaggcaaggttagtggctatgaaaataccaccaggacagggctatctaaagacacttttggtagtgtgttaactatacaaaagaagacaccatacagtttaaaaaaattcttacacagccttacatttcaatttttttctttaaaaggagtgagttgtatacaggggggttaaatgctttatagacaagaaaaaaatctgtgctagaaccaacttattcatcatcatcatcttcttcatcttcctcctcctcatcctcttcatcttcctcatcttccttgtttttcttgctttttcggccttggcaactcccttttttgctgcatcaggctttcctttagctcaatatgcagcagtatccttttcgtatttttccttcagcttcgcagccttcttttcataaggctgcttgtcatctgcagcagtgttattccacatctctcccagtttctttgcaacatcaccaatggacaagccaggatgttctcctttgatttttgggcgatactcagaatacaacaggaagaacgctgaaggaagcctcttgggtgcattgggatccctgaacttcttttttgtctccccttcaggagggacgtaggttttcatttctctttcataatgggtcttgtctgtctttgccatatcttcaaattttcccttctgtttagcagacatggtcttccacctctctgagcacttcttagaaaactgagaagttgactgaagcatctggatgcttcttatgctcctcccaacaagtttgcacaaaaaatgcgtatgacaacatcttgcctctaggcttcttaggatctcctttgcccatgtttagttgtttttccacagcgaggcacagagtcacccagtgcctgtctggctctcgcttgccccggcgctgtctctatcgtaacctctttaagttatgtgaaagttacaatgctgcccgccccacagtgagagctaagtaatctctccttcccttcttgagcctccatgactttcatgctgtgtttcacagagtcatgggtgggtgagcatggagactacacagtgcaggtccctggtgtaacagacaattcccactcctgagaggaactctggtactgtgcctaacagagtcagctatgacaacttcacatttcatactgcatagctgcagaaaaatacatatatgagaaccagagagaaatgtaacttacttgcaccaagtctcaaaagcaagattagcagaattagccccctaccaaactaatggccctagtcatacccatcacataacttcttttttcctggcagattcagtggaaataggggcctgatctcgctaagggggatgagagtataggatttttttttttctaaaaaagaagcagagctttaaaatacaagaaaagtcacatatcatctcctggtgaatctatcacctgcatatcactgcctttggcatataccttaccttcacagtcagttaatgtccacaggacaaccataaactgcatattcttatttctctggatagagaatgtgctctctctccccaagtctggggcaatggattgagagctagtaggctccagtacacatcagtgttcctttacaatactagctcttcccagcctatctgccacctaacactatgttaaacatactaatacttttaccaggaaagggagaaaaaaataaagtaaaaaggaaactgagaggaagagtggtgggaggagggaagtaaatatgatcatctctgcaaatgtccagtggcaaatagacttaagagtttatgactctgcaatcatctcagctccttaagggtgcatcttaacagttccccaagtacacaggttactgcctttgccaggccagcatgactcccttcaagcagggtaatttgccacacacatcaggtctgccacgcagtgaggcattttaaggaatctgtcacccacagcctacagttcctagagttaggatctactaccttgagtgacatgaaatagcaagcccctagaaacttctcttattaatgtcatcattctcacgacatttggacaaacaggaaaacgaccggaccaccttctcttaggctttacagaccactaagcaaagaggcctgagctttcttcagtgaaacttagggacatgaaagttcatgttctgaccctgatctagtctctctcaatgaaactaagtcactttcccttctgtttttgccttcctgtctacgaaatatagccctgataccattagcccattccagaagatagcaaggaaccagacagatattcttgactgaatttcaagcaaacccacttgggctgcttctaatcaccagcctactgcctttagttctaatgtcaaatgtgcttagtaacactcaataaaatccagatactacaactcatctcaatttgggtaatattttgaatattttacaaataactgcaggcaacaaagcaagacagacatggaaagaagatacacaaatggtgagttcacagggggaaaaggataaaaatacgaaggtgggaagcacttcctggttttggaataaaagacacagtggcaaaggatggcgtccatgaataaaacatgtaagtatacagaaaaaccaccaaaagtaaaaaaacaggaaaacaccagaaaatatttattttatatgaaggttactactgttggctataaaaagaaatcctttaaaaagtaagagtctttggaagcaaaagataggaaggtgtaaactaattaaaaacaggctaatgacaggcaacatcatgtgtatgccaagatggagtatagccataaaagccaggcgcacacatgcaatgtattaagttgaaaatgcatgtctcttcagcttcatatctattaaaggaagaaacaatttacaggttgctgcattatgggagtatgatatgtggagtgtcaaccttttctcttcaaactgaaccatgttaagtaaaatcaatgatggggtttggggggtaggggaaggaaggggaaaagcagggagaaagaaagtttttaaaaatctctgcctcagcaaaagttttcattaaaattttagacaaatcatccctgtgtccttctcccttgctgcctggggctccatgctatttctatgcaaataacaacctcgtggtttatatcttattatttccaccggagctgcagcgacatgacctgagatgtgtaagaggtgggggggaaggggggggcagaggaggggatttggagaggagagagaaagggagagaagaaggaggggggagagagagagagagggtgttcactcaagtgtgaaaaaatattgtcaggagtgagcatcaagaacaaaaaaaaattgcagggataacgtgtttatttcagtcccccccaaaaccccccaaccccccttcctgcaaaccagcaccttttaaaattcattgggcatcaggcgatcatgcacaatccatctgctttcactttatcatttgcatttcatgcctcctggcttttgatgtgctgatactttgatgcagtcaggagacgtgcattatcattatttcaattttcaaaggggtcaacaggatcggcacttgcacacacaagatttttttcccctacaacctctgaacacccccactccttattcttcaccccaatgtttaacataaaggatgaagactcaaaaatgtgggggtcaaatatttacagtctaagactgtatataagcttgcatgtctcctacatttccaccttacacaggtacatactatgagcaaaatggccaaggcttaagaaaggaggctctataatgtttcaaaaacacaaagactttctcacacatgaacacacagggcggcacacagacagagaaagagggggatctatacgcaagacacagacacaaagagacagaaagatcagcacccacacagaaagagacatgcactcagggtgacttgcacacacccaaagtacacaatacagagagatacctacagaaagaaaggcaaacagagatgaagaaaaacaccagcacacacaaagacaacacacagaaggagtgagtcagaggaagccatctgagcatggtagtttccttttttcataccttataggcaaaggggctaataggatattctgaacgaatttgcataaaatcgggtgtcttcagcagcacagctctatacttaagaggagctgacatgaagatagtgaagcaggcagagcaacattaggtaacctctgtatctgatcactcccttcagctaaaaacaaatatgcccttttggaagtgagcattgtttggtaagttaaagctatagctttatttatctttcaccctgtaactaagcttttgttttaacaagcagccctgtaagctatgacagtgaatataatgaatttgattagaacaattcaatcagattttaagaaatcaatctctaatgtttcttcatggcacaaatgaaattcaactagcaagttttcaagcaaaacaaaaccaaaaacccaacatctgctttttgtaatattctttgtatataatatagtatcggggcaggggggagaaagaaactcaatataagaagatatatttcagaaattagctctctgactgggtatgggaacatcatggaaatataggtttttaaagtaccattatctatgagaacagaatttttaaaatctttcaaaaattctgttctcatagataatggtacctaaaattatctttggcattcatcaatatctcatcctaagaaggtatccaaaagagcaacttaaaaaaaaaaaaaacaacaaccttaagactctcagcagtttctcccactgcaataataatcttcagtagtagtggttcacaacctttatttccaggctactctccaaaaagggaggaagacagccaagttcgccactgttagcactgctgtgcctttccttgatgagaaaagcaagcccagaggaggatacagagttcatatgaatgcacagagcaagctgatcgcatcaaatgattcctctaatttctgacatccacaaaatctaattaaaccaatggaattatcaactttttcctaaatgggaatgacagaacacttaattcttacccttaaacttgaaagtcaagacttgataaaaagttcctgcaagtggagtaaacataatatctgatacaatttagtatgtgtattaactccataagctcaatcaccaaatcatgttagagagaggaacgggaaactgaaatttgaatgtgggccaacactttttgccaagaactaggtactctttttttttttaagagatggggtcttactatgttgtcaggctggattcaaacttctgggttcaagctatcctcctgtttcggcctcctgagtagctgggaatctaggcatgcccagtagaactaggtacttttacttatgttttctcatttgagctccacattatttaaaggtttaaattattatccccctttgacagataagaaagctgaggagctgagaggttatataagttgcacaagggcagtcagcctcagaatattccattatacttttctggccctgaagagaaaataattttcctatgcttgcaaagatgtcagaactgcactgtcctttatacattcaggtattcttggatagttttcactctttcgagcagtgaccttgccatccatttttttcccctttggaaaaacccttgtgaagttggactaaaaaggcacaaatctttctttggaagggaagataaatctttatgcatactctttcccagtaacccatccatgcatccatccacccatcttcccactcaatatttgccaaatatttcttctatatacaagagaccaccatcggtgcccttttcgagaggtgtatttacagatttcacaaaatcattaaaacttgatagtctcaacacctaggccggtacctaattcatgatgtaggcctgaaatgggaaccagcacagctggaatcagagacagctcaatgtctgtgtatagatctcctcacatcttttactaatagattaagaaaaagagagaagtgggacagaacagaagcgttcaattaattctgtctttctacaacgacactaaaacataagcactttagagcagcggttttatatggtttgttcactaacatatacacagggcttggaacagtgcctagaaaacagtaagtactcaaaatagttgataaatgaaatgaatgaatgaatgaatgaataaaaaggcaagcaagtcaatgggcagaaaagatggagggagaggggaagagatagactgaggaaggcacggattgaactgcttccttccaatcaggatcttgaattaagaattcacacaataatcttcaatcagctatgcatacttcttcaaaaccctagaaacttactttgttgagggctccagctcctgttagaattaagtgagaattctcaacctggatggttctctgtcccagccggacaaggtaagccccaatcccaatggcccggcacgtcaccttagaaaagaataaattctacatgtcacatatttatgtcctctctgaagctataagaactaaggcatagataagtaaaatccaaattaacagaaataaacattgctttttatgaagtctatttgattgacaacaacacacacacacaaatttcatggtcaaagaaaagaaaatacaatgatgcaaaattcaggctgggtgcaatggctcatgcctatcatcctagcactttgggagtctgaggtgggcggatcacttgagcccaggagttcaagactaccttggggccgggcgaggcagctcacacctgtaatcccggcactttggaaggttgaggctggtgaattacttgaggtcaggagtttgagaccagcctggccaacatggtgaaaccctgtctctagcaaaaatacaaaaattatccgggcgtcatggcacgtgcctgtaatcccagctactcgggaggccaaggcaggaaaaccacttgaacccaggaggcagaggttgcagtgagctgagatcacgccactgcattccatcctgggcaacagagtgagactctgtctcaaaaaaaaaaagacctacttgggcaacatagtgagacccccatcactacaaaaaagttaaaaattagttggaggtggtggcacatgcctgtagtcctagctacctggaagctgaggtaggaggatcacttgagcccagggggtaaaggctgcagtgagctatgattgcaccactgtactctagcctgggtgatagagtaagactctgtctcttaaaaaaaaggaaagaggggccaggtgtggtagctcatgccggtaatcccagcacttttggaggctgaggcgggtggatcacgaggtcaagagattgagaccatcctggccaacatggtgaaaccccggctctattaaaaatatgaaaattagctgggcatggtggcactcgcctgtagtcccagctactcaggaggctgaggcaggaaaattgcttgaacacgggaggcggaggttgcagtgagctgagatcgtgccactgcactccagcctggtgacagggcgagactccatctcaaaaaaaaaaaagaaagaaaataaaaagaagttacactaaaagctaaaacaaagtgctgggtttgtttgaaaaattcagttatttatattatcctatcttcctattatcatgtgtgattaaaatataattatagacatacaatcttcaagaaatgctctcatttgggactgaatagcagtgataagagaaaaaaataaacctagccacacagccagttcttcaaaaatttcacattctggaaagatttaccaggctgatggtaatgatctcattataggccaatgaggattctccagcaatcattccagaacctcgaaggttctcgggtccaattccctcttctttcccaataatatctgttatcttgtacctattggatatggccatgtcaaattatgaatgttaaacacagtaacaacaagccattaaaagaataatcaccaataaaaggcggctaaaagtgtattgaaagcttatatttaatgccagggctttatgtgcttccttttatactcttcattcatatgtctttccttcttagcttggtgcctattttacctggaagcaacatggtttaatagaaagagcgaaatctggaattaagcagatagccttttttctttttttttgaggcggagtctcgctctattggcaggctggagtgaagtggtgcaatcaaggctcactgcaagctctgcctcccgggttcacgccattctcctgcctcagcctcccaagtagctgggactacaggcgcccgccaccacgcccggctaatttttgtattttcagtagggacggggtttcaccgtgttagccaggatggtctcgatctcctgagcacgtgatccgcccacctcagcctcccaaagtgctgggattacaggcgtgagccaccgcgcccggcctaatttttgttttttttagtagagacggggtttcaccatgttggccaggatggtctcgatctcttgaccttgtgatccacccgcctcggcctcccaaagtgctgggattacaggtgtgagccaccgcgcccggccaagcagatagatttaaatccttgctctgatacacacaggagtgtgactctagaaataataataacttctacaaaatgggaataataatatctacctctaagggttgacaagaaagttaaactaaagcaaacaaggaaaaggtttgatgttatagatggccctcggattttagatgccctctcttattttctagaacaagtttcttaaaagcaaggtcaatgtatatctctataatgagcaaaaggcatcatatcaacaattttagacaattttacgtaggaagagaatatccaaacagagcggtagtgagaatgctcagcttagtttctcaagtcaaaaatcctcttctaaggtaggatgaagcaaaggtcaaaatactgaactcccattcatactccttcataaatatcaagtatatacacaagggtccctggatatgtcctctggaggggaaggtggaatgtgtgtagaagtgaaatgctgaccaagttgtccagaaagcatcctgtggatctagtgggagtcactcatctgtcttcctggcaggggattaggagtgatagctgataatgggaaatgggagatggggaatgcaactaataaaagaaaggaaaaatacaaagttggaagtagagatgggcatatattatttattgttccacgtgtacccagaaggcttggcagtgggcacagttttataaattgaaataataaataagtaccccatagtggctcttaaaatacttcctcctgcccccatattttcctgctcccttcttcatttccagccctccatcaattctttttctttgcccttgctgttggtctgtgactttgcatctctgcttcccagattctgctgcctttctatttttagcctctcctaatatccaataatttcccagttcttccttttgttctgtatctagactctatcctaaagttatgtcagaaatgaggctactgtcccttaagggggttaattaactacattaattgtatatgtgtttgtgtgcctgtttgtataaggtccatatagtcataaatattcaaggacccagccagacttgcctgtaacaaactcaatattcatagattccagaaatgaagagttaaaaaatatcataggggaaaatcccattcagagtagcaagaaaaaatgcaaaatatttagaaataagcatgaagaaattggcagaatctcaccgtaactatattgtgtctcagggcaccatgatgaactcccagaagcactacaagatattttaaatttttgagagaagcactattatatgtggtatctgtgaccctatgtgaactactagctttagatagttcatagtagttcacagtttaacgttagaatggtgctacattccttttgaaaatgtcctgtctttgcaagctagatttttgaagtttctgtgaaaactcaatgaagaacaagaaatgtgggtggctatatccaagctgattccaaggtttgagaggttatgcagacacaaatatctcattagtaagaaactgtaattatttaagaataaattttttcgatttatgtatataattttttcaaatgattattaagttcttaggacgcaaatacttattgtttaactacctaataagcagaaatattaagtatatcttatagcccaggggtgctatgaaaaaattactgagacactaaggatgccatgaaccaagaaagtttgggaacctctggcaaaacctatatgaagaaaactacaaaacgtaaaaacaaaacaaaaaaaaccccactcatataaatggaaaaacataccctgtttctttttggggaaagttagtattatgaagatgtcacttcttaaattaatgtgtaaactcaatacaatctgaatcaaaatcattatggaacttttttggaattagaaaaacatgagactctagccaaacacagtggcttgcacctgtcattgcagctacttcagaggttgaggtgggaggattatttgaggtcaggagttcgagaccagcctggggaacctagcaagactctatctctaaaattaaaaaaataattagctgggcatgatggcacctgtctatagtcccagctacttgggaggctgacatgggacaatctctgaagctcaggagtttgagggtttagtgacctatgatcacaccactgcatcccagcctaggcaacagagtaaaaccctgtctctaaaaacaaaaaccctctacattaaaaaaagcaaaagtagccaataatacttgaggaaaaattaaaaatgtgagaaaatttgcctcactagaatagtttaaatagtgtggtattagcccaagagcagacagacagaacaaaaaaacacaaaagagtaaattttcagtaaatagtattaggacaattaacttttttttttcttttttttgagatggagtcttgttctgtcacccaggctggagtgcagtggtgtcatctcggctcactgcaacctctacctcctgggttcaagcgattgtcctgcctcagcctcccaagtagctgggattacaggcatgtgccaccaggcccggctaatttgtatatttttagtagggatggggtttctccatgttggccaggctggtcttgcactcctgacctgaagtgatctgcctgcctcagcctcccaaagtgctgggattacaggcgtgaaacactgcgcccagccaagcaattaacattcttaaaaatacttgcagatagattatataaaaacattcaacttcactgggagtcaaaaatacaagttaaaataacaattgccatttttattccattttattaattgataataatcaatgttggcaggggtgaagaaaaattaaagagggaaacaaatcctattctacactgctgacagaaatgcaaatcttgggaaggcaatttaaaattattttttaaaatccttaaaaattgacttttcgacctgcaatttctcttctagaaattaaccaaaaagggatgatcagagcttttaattcctaaaagtttatatgaaacttatataaatgtcccttaagtgggttcagccaagggatgtgaaaaattagaaatagtctgaatgttcaaatatatttattataataaaatactatgtagacattaagcatcatattcttaaataatgttttaagaatacacgaaatttccccaaaaatagtttttagtgaaaaggataaattataaaagaaattcttgttataatctcaatcacatagaaaaaagatatgtctatagaaaagacagcaagtgtataacataaattcataatcgtggcctgaaggtgggattgtggctaatttttttttctttataattgtttacatgtttcagtttttctaaaatgaattaagtattataaatttaaaaacttcaatcaataacccaaggttcttcagctaataagtggtagagctggatgtaaacctaaaacatctagattatgtcatcttcaatgttcttcaaggttatgaacagctgtacaatatggaaaaaaataccatattctcctttctttagtcatgaccaaattattccaatacatatatacctacctggattctccttcatcttccacgtgttcacaatggacagagttgagagcactgactctcttataatcttgaggagtcagatataaatacctgtatccctgtgaagcacaaatagtttttaactcattatttgccattgtcatataatcagaagatacagcaaagcatacataatgaagcttgttccacagctagctttaaattgccacatcacttcttaggtttactgtctaacagaatactagcacagacagtcctcctttgaaagatgaagtgcctattttttcactcactaactgtccttgaaacaagacaccttatagctgcaattccaagtatattcccttcatttcattttctttctttctttctttttttttttttttttttttttttgttgagatggagtctcactctgttgcccaggctggagtgcagtggcgcgatctcagctcactgcaagttccgcctcctgggttcacaccattctcctgcctcagcctcccaagtagctgggactacaggcacccaccacctcgcctggctaattttttgtatttttagtagcgacagggtttcaccgtgttagccaggatggtctcaatctcctgacctcgtgatccgcccgcctcggcctcccaaagtgctgggattaaaggcgtgagccactgctcccggcctcatttcattttcaacagggttaaagggtcattttctgatctttagtgacatctctattaaagatatcaacatgtaattaaagaattgtgtgaattactatttttcactctctcaaatccacaggatcatcaaaataaatataagcaagggataacagaaaaccgcaaatctaggagattcaatattaaaatcagaagtctacacagtgctaatagtgaacactgaactcagatcttttgttttttcaataaacaactcctaatgcccatttacatgtaaacaattatactaacatttcataattgatttatatgtatctatacacacagccacatacaaagtagagttacatggtatatgtgtttaacttaagtgaattagtcactcagtcaaaaaaataagtaaacacagggaagcattttaaatactatgagaaattatgcccaccatttaactcaataaatgtatgtcccacagtgagcacaacacggaaaagacataaatctgcgattggtcttgcatgatttgtgttgagaatgcctgacagcactgagtgtcattagtatgtcagtcagtacacatttactgagtgcctattatgtacaaggtactattccaggcactggaaaaacaggaattaacaaaaatagacaagaattcctacccttatgaaacatacctcctactcggaaagtcaggaaatacacaaaataagtaaaatgtataatgtaaatgggaataacgtttaaggaaaacaaaatgaaagagaaggtagacagtcgaacttttagaaaaaataaccaaggaaagcctcattgaaaagtgtcatttgagtaaagacctaaaggagctgaggctatgagacatgaggatatctgaggaaaaagcattctaggtagaaggagcagcaagtacaaatgcactgaggcatgatgtgcttcgcaggtttaagaaagcagagtcgggtagagccaatgtgtggaatggtcaggggaggctgtagcaagaaatgagggcagagtggtactggaaagccaatctatgtaaggccttgtaggcaactatatgatctttggcttttacttgaatgaattgggaagctattaaagggttttaagtggagaaaaattttgtgatctgatttatattttaactagatcattctatctttttttttttttttttttttttgagcagagtctccttctgtcacccaggcaggagtgcagtggtgcgatcttgactcactgcaacctctgcctcctgggctaaagtaattctcccacctcagcctcccaagtagctgggattacaggcatctgtcacaatgcccagctaatttttatatttttagtagacagagggtttcaccatgttggccaggctgttctcgaactcctgacctcaagttgatccatctgcctcagcctcccaaagtgctgggattacaggcatgagcatgagccaccacacatggcctcattctacattctgttgagaacagaccttgggtggggctgggagcaaggccagaggcaggaagaccaattaggagggtactgcaatatgcaggtaagaagagttagactactgctactgctagtaagtagctgtggaatttgttagaagtactcagattctggatatattttaaggtagggatgtaaacatgatttactgtttagatggatgaatggggtgtggaagtgaatgtggggtgtgcaagaaagacagaagtcaagaataactccaaggtcttttacttgaacaaatgaaacaatagaggtaccatctgttgagacagaagactgtgggaagaacacattaaaggaagattagaagctacaatttaggcagacatttaggcagatgtaagtagagatgttgagtctggatatatgaatcttgtgttcaggggtaagatataaatttggaagtttatcagcttgtacatgaaacttaaagctttaaaagactggatgaggctgggtgcggtggttcacacctctaattcctgcactttgggaggccaagatgggcggatcactttgagctcaggaattcgagaccagcctgggcaacgtggggaaaccccatctctacaaaaaccaaaataattagccaggcatgctggtgcatggttgtagtcccagttactcaggagggtgaggctggaaaattgcttcaacccaggaggcagaggttgcattgagccataatcgcaccactgcacaccagcctgggcaacacagtgagaccctgtctcaaaaaaacaaaacaaaacaaaaaaacaggatgagatcaccaagggaaggtgaataggaaaagaggagtagtccagggaccaagcccttgaatcacttttttccttctaccctactttctatattggctgtcttgccaaaccaccaggtgagagggcattgggtcctagtggggttgagaatggggagtccagaacttcttggtcctgctgcagcctctgtgctcctgacatgtctccattcacttttttttataattaaaaaaactggccaggcacagtggctaatgcctataatctcagcacttggggaggccaaggtgggaggatcacttgaggccaggagtttgagagaagtctgggcaacacagcaaaaccttgtctttatgaaaaataataaaattagctgggtgtagtggtgtgcgcctgtagtcccagctacttgagaggtggaggtgggaggatcacttgagcccaggagttggcagatacagtaggctatgaatgtgccactgtactccagcctgggtgacagagctagaccctgtctcttaaaaaaaaaagagataaaattaatataacataaaattaaacattttggtttttaaagtttttttttagtctcactctgtcacccaggctgagtacaatggcacgatcctggctcactgcaacctccacctcccgcattcaagcaattctcatgcctctctacctcccgaatagctgggattacagacgtgtgctaccatgaccagctaattttttatattttagtagagatggtatttcgctatgttagccaggctgatctcgaactcctggcctcaagtgatctgcctgcctcggcctcccgaagtgctgggttactgcaaccagccaaaattcaccattttgaaatgtataactcagtagactttagtatattcagatgttttgcaaccattaccactaattccagaatattttcatcagccccagaaaaacccctgtactggatcaattcccatactttaataaagtttttctatgaactttattgaaatataatttacatgcaataaaattcatcagttttaagtgttataacttgatgagttatgacaaatgtatgtacttaggtagccaccaccacaatcaaaatatagaatatttccatcatctcctgaaatactcttacatttaaagatgtgaaaggcagcaaaggaaactgagaaagaggagccaggaatgcaggaagataaaaaggagactttgggctcttggaagccaacagaagaaagtatttcaaggatgaaggaatgaccaactgtgtcaaatgctaatgctattgtcaaataactaaggtgaagactgagaattcaccatagaattcagtaatatggaatcactggtgaccctgacaaaagcagcttcagtggaatggtaagggtgcaagctcaagtgaagtgggttcaagagggaatgggagaagaacatctggagacagcaagaacaactcctttaaaacaattttcctgtaaagggaaggaggggagggacagtgactggaggggtgtttgtatgctaaaagggctgatacagtacagagggaaaaagtgctgatgcacaaaagagcaggaggaagtgttgatcgtacacttaagttagcaagaaaggagatcaaatgtacaagaggagggattgtctttagacagaagtaggaactattcattcaaagtgtggaagagaaggtgaagagtaagggcacaacggatgcaggtacatggaagcttgtagaagctctcttctcattgtttctcttttcttgaaaattgggaagcaaggtctgatgatatcagctaagagtggggagagggaagtgcgtgttacaggtttgaggggagagatgtgaaaccgtcatccaggaggttgctaagcttgaatttaaagtaagatcagtcaacagaactgtttttttctccatcaaagttcagctgggcaggtgcaggcatgggagcagaatggagagagttggatttaaacactctgtaaaagcacagagtaagcagagtgaagagagaagcaagttgaagcaagttgagagagaaagttgaaggtgcagaaaagatggtgattataatgattaatcaaggactgaccttggagtttaagccagataggaatgaaatgaggtgtaaggagggagtgaagaacagaagaaaggtgggaggataaacaggtgagttcaactcaatggtactgatgatttcaaaggattgttggactagagagaggaagctggaaagagaggatggagggggtagcaaagaaagagatacttgaaattgagattatggggaatgagaggctgagctagggtataggacagaaccactagaagaaaagaagtcaaggatccaagaggccagattatgggaagaatcatctatgtggatatagcaatcaccaagaattatcacatgactattagtaatggacagagtggcaatgtgccaggaactaaaagatgcaaagaatgagagggagtgaccaaaggatcaggaaacacaaggagcagtatgggtatggcacagtctgatgacatgagattcaaagatgggattttttcagagagaagggagaggtgtctggaagcagcaatgaggatcaaggaggacaatattccccttccaggctcagtggttcaaaagaaagacagaaatcagtcagtacttcagagggctacgggggaagcaatatctttagaggagagacagatctcaaggtgaacaaggaggttggagcagaagatgaggaggtaagggattttgttgataattgaccgtaagtcctggaagccacaattaaataaagatatatatttttgatttagcatgtctcgcactaaatgcatacctactatttcatctagtgctcaaccaaagaaacagcaacctgttttatagatggaagaaaaaccaagtgaacatattgagaaataatttgtctttaatatggtgtcttaaggaattttcacaaataattttgtttatatttaatttttaccataagtggtgatttttgaacttaaacctctacccttcccccacctctccacacatgtagcataaccatatagcaccttgaagtagtatatgctcttagtgtgtaccttgtaaggatcctcaggatctacccaggccacatgaaacatatggcgaatttcttctgccagtccgattcttgctccactgttggctgatacatagatgcgtggaataccttctgccctagcaagttcggaagctctgagaaataacaaatcctcttgaggcccaaaggacccaattcggtatgtgatgtcattgccaataacaatgatatctcggccttctggatattcaggacttttaaaggtcattttccaagctaccatgccaatctggaaaggcataaacaaacaaatgaacagaagtttcttacaggcagaatttttttcaggttcattgaaggtatcagagtatacctaggcacagccattatgtaaagatacacattgctaaagagccaaactccctgtgggaaactacaaaagacattctagtatactgctagattatgctgagaacagctggtctactgtgtatttcaaaactgtctcaattccttctttgggcctgctcaaagaagacagaaaagtcaaaatctaaatgcactcaggatacatgtggaagaatgccatggcactgttgattaaatctagatatctcattttactgccatatatactaagacactgatatggtttggatgtctgtcctctctaaatctcatgttgagatatgattcctaacattagaggtggggcctggtgtgaggtgtttgggtcatggggtggatccctcatgaatggcttggtgctcccctttgatctgagtttatgctagatctggttgtttgaaagagtgtggcctcttgtgggtgaaagcaagcatgaagagagtgctatgaacgccttgggcacactacaagagtacaaggtggtgggttgctgcctgcccacccccaaatgccacatgctgcccttctatggtatgcgaatcttgcacctaatcatgtcattgtcaagtcccgtctctggtacttggtatctcagctaaagaagataaggagtcttcagggaaaattgtctactgtaggtaggtgtttgagaaatcccccctgcaggtgaagaaatctggcatctagctgcactacgactcccgtagcagcacctacaacatgtactggatatcaggacttgaccaccatgggtgctgtcatccagtgctagtgagacatgggcacctggcatcacacacaggcccactccacccagatcatgaaggtggagactgcggccagcaagtgctgccagctggcggtcaaacagttccatgactccgagatcaagttcccactgccccatggggtcctgcatggttagcataagccatacttcaccaccaagagtcccaacaccttcttctaggtgcagggccctctcacccaggtgtggcttaaattaactcaaaaatgtcacggtgctaaaaaaaaaaaaaaaaaaaagagtgtagcactttgccccccacctctctcttgctccctctcacctctctcttgctccctctctcaccatgtcatgtgctgggtcccccttcaccttcctccaagatcataagcttcctgagacccttagcagaagcccaacagatgcagttgccatgcttatagagcctgcagaaccatgatccaaaaataaacatcttttctttataaattatccagcctcaggtattcctttatagcaacacaaatggactatcacagacactatttccatcttttgtgacatttgttccaagaaacctttaacacacaaggaagcagaaaaaggatgacgtctcacggactgtacacttttcatgatccaggctccttgtactgtcctctagcatttgataggaataacagaaacactctttactgatttgtttcaggtatgttccatttctgctagaatttaccaatgctcaacattgcatccttgtgagcatctcttgctttcttctagcaccagaaaaaccaaaggatggaaataactaatctcttgctgcactatatgtaaatctctgctctctgttcagcagcatctggccagctacacaaataaatgatattgacttaaaaggcagaggtgacatgtctcttcccaaactctcacagccctctcctgttttaatccccttctatatgagaactagtcaatccttctacttgtatatttgctagttccatttcttttctatgctattcattcatacgctagttacagctgtagtttttcatgtctgcctgcctgtttcccctatacctggataagtaatgttttccattctttttttccccctttctttctgtctctcacccccctccttgcccccaccactcgccaccaaacacaaagcctacctaccagatgagcttccctggtcctgcctaatggagccccagccacatctgcagccttggtccctcatccccaggctgctgcatatcacctcattggggagctggccatcaagaagggccattaacagatgtaaatagcggcatccctggaaagccacatgcatcacccagactcaaccaggccagtgatcataagctctgagtacacattcctcaatccaattgcacatccactgtaatcaggctggttgaagcattctacacagctatttgtgattctcagcattaggaaatatatatatgaaacaccctcagataaatataagctatttaatatatcataccattggccaaatacaagtcaaaatggatatgatacacagaaaaaaatccaatcactttctaagataaggtattactctatctactcattaaagacagagaaaggaaggaaaaatagatcattcaaaaaataacacagtgaacactcaaatatcaggataattttggttgtggtttctaagaagctagttaatataatccctgcatgaggagaaatgctttatctgccttcacacatgcccctctaaccccaaaccttttgtttttcaggaatgaaaagctattttctgtcaattttcctctaaatgcatttgtagttagaaagattgcgttttacaccaaattttatgatatattaaccctaggcacataggccagaagcagcttagatacaagccctgaagaatctacttcagcatttgtgtgctaatgtaaacattgtgaccatgtggcactgggcaggcaaataatactcttatctttcattactacctggggactctaactgtgtcacttgggcagcaagttcagcaattggctaggtcattatgcttgcaatattgacttctaattaggtgtcagcacagcagcaccaagaacacactattctttatcaatgtctttccaaagtatgttgctcatcgaccgcctccccaccccgccccgccccccatcttaaaaagtaccattacagaatggagagtgttatcccagtctcagtgcagcaagattcctgatcagaagacattcagttttgaggtagcatgatggacaaacatctaagaaagcactattattcaatttacattaaaataatttagatttcactgctaatcaaaggatagggcatataaaggtgaacatgggctttggagtccaacaaacttagatccaaatccaggcgctatcacttatattaactaactgtgtgatcttaagaaaattatttaattttactgagcttcaatgtccccacatgcgaaattaagaaaataatacccatgggtttgataaacacactattagaagcagaaatctactatattaacttctacgtaaaaaactttgtctttctctctcctctcctctcactctgtccaaatcttacccattccaaaaggttcatccaaattccatttcctcagtaaagcttctcccagcctaaagtaattcctatcttttctgatctcctactaagacctctgtgtagagaatttttttttttttttttgagacagagtctcgctctgtcacccaggctggagtgtagtggcacaatcttggctcactgcaaccttcaactcctgggctcaaggcaatcctcccatctcagcctcccaaataactgggactacaggcatgtgccaccatactcggccaatttttgcatttttttgtagagacaggattttaccatgttgcccaggctggtctcaaactcctggcctcaagccatcctcctgcctaggcctcccaaattactgggattataggcgtgagccaccttgcccagcctgagaattcttctgataactaattatatgctgcctaggattgcttttggcttaccatcttgaacgattatagcatctcctctagtgcttcccaggaacattaaacatagtctgggagtaataaatgtttgctagttccagagtctttttattttttcaatttaatttttttttttaagacagggtcttgctatgtcacctaggctggagtgcagtggcacaaatacagctcactgaagccttggcctcctgggcttaagtgattctcccattcagcctcctgtgtagctgggaccacaggcatgtgtgttaccaccatgcccagctaattttttttattttttgtagagatggggtctcaccatcttgcccaggctggtcttgaactcctggactcaagtgatcctcctgtctcggcctcccaaaatgctgggattacaggtgtgagccactgcaccctgcctcacttttaaaaataacacttgaaaaatacttaacaccaagggcttagaacattgccacttatattttaggaatcatagaataagagtcctgaatattcttaaactattttattttaaaaataacaatagctatcataataactaccattaattgaacatttactatctgctgtactgttctaaaagttgacaactactgatagtggttaagagcttaagctgcaaagtcaagctgtcttggttcaaatctcagttttatgctagccgtataaccttggacacttaaccttttacagtttcacttttccaattataaaatggggatgacagcacctttctggaggtattgttgtgagcaacaccatgttaaactagtacagagcctggcacacaaaagccctcaaatggtagtcagtattaattcaaaggtagctgtaattattgccatgaggaaattaaggcacagaggaattaagtaacctgtccttatagctaatgtgaattgtttacttattttttttttgagatggagtcttgctccgtcacccaggctggagtgcagtagcgtgatctcgggtcactacaacctccacctcccgagttcaagcaattctcctgcctcagtttcctgagtagctgggattacaggtgcatgccaccaggcctggctaatttttgcattttttttttttttttttttttggtacagatggggtttcaccatgttggccaggttggtctcgaactcctgaccttgtgatccgcccgccttggcctcccaaagtgcttattttttaaaaggagtttcacatacacaaaaatggtattttctttttttttttttttttttgagacagagtctcaggccattgcccaggctggagtacagtggcgtgatcttggcttgctgcaacctgtgcctaggttggagtgcagtgatgcaatcttggcttgctgcaacctccgcctctcaggttcaagtgattatcctgcctcagcctcccaagtaactaggattacaggcacgtaacaccacgcccggctaatttttgtatttttagtagagacgggatttcaccatgttggccaggctggtctcgaacccctgacctcaggtgatccacctgcctcggcctcccaaagtgctgggatagcaggcacgagccaccgcgcccagccaagaaatggcattttctttactagagaaattaaggaagtatgttccttaattaaaaagatattagtacaaaaactggcaaaaaaaaaaaaaaaaaagaggtctgtggtttatttaatacaattgtatcaatatttatttcttagtttggtaatcatatcatggttacataaagtgttttaacattaagagaagctgggaaagggtataccagaactctctaatatgatctttgtaactttcctgaaaatctaaaattattttggagggaagtaaattggatagcaagatcactgttagtgttctgtacagccttataagatgatgactatgaagactatgaatagcatttaaaaatacccatgatgtaatactaaattagaaaagggttcagactcaggagccacattctgagactctgaatctgaatctaagataatttgacagaactgagactcagctttctagccatatacgctaaggtaagttatcaacctccctgtacctcagttccttcactggtaaaacaagggtaataaaaatctacggcataagtttgttgtaaggattaaatacatgttaagtcctaggatagtgcctggtatatagtaagtgcatagtatgaatgacaacttcatcaattgaaaagcactttgcggggtaaaaacaaaaataaataagaaacagcaaaatgaggtgataattattgggatgatgaaattgtattttttttccattctccaaattttcttttttgtgtttatattgcattgataactttaactttttataaaataaaaaataactgagaaaagaaaactaccaaatactcttcactgggtgataggtacatgggagtttatattatttatgcctactttagtgtacgtttgagcatttccataacaaaaaaaaaaatttaaggggggaaaaaaatctcaccagcctaattgatttcccatattttagaggaactaattctagattttagtcatactacaaccgatcttatttatataaaatttgaaagagataaatgtatgaaaattaaaaatcaagactcactttaaagagaaagaaatatcaagaactacgttagtttgttgggttatcatttcattttctaaaaagaaatgctctgcaatgatgtggtagagtgtaaacatatgtatatataggtttatacaatattaatgtctctacctcagaagtaactgcttcagtgtttttctggtctgatggttaaatacatatttatatttttaaagtcaatatttgtacaatagacaagaacagtgcgtatcagctaaatacatatttaggactgtaccacatgtattacaaacatgtactaaaatcgaaagcttttatttatacagaacctttcatcttgaagagggctaaagaactttacaaacatatgtacataaaaggacgtttgcactgataggcagggaaggtactcattcacccactcccctatttcttctaccagtcctgggtaggaacacatggtgtcaacagatgcaggtctgtaacagctgcaaagacatacaacacaataatccagttgtgatgcacagtcactgagaggaagcttgcaacttgagaatagcaacagctctcctccagtgtagaagcaccatagccatttccagctttgtgtttttaaattattctctacccaactcaactaatcacctgacaaaattgaatttgatactggaaatggtttctgaatgcaaaatactttctgtctgatgatgaaaactagattgaaaaatgcttccctctgcccttgttagatttaggaaaaataaaaaagggttacaacattcaggagaaatggttcaaaatattctacctaagaatagcttcatctcaaaggattagatcattgctttggaagagagtcatatttcactctctaattagtacactgttaagtttttcagtcaaattactttctatagatgggtctatctatattatatacataatggagatttcatatcgaaaattctacaatcactataaaagtatacacagtgtgacaatgtgattagcaatgtgacattcattgatttcacctaagcccaatctgcatgtatattaattgaagaataatgactaacggagaccccatcattaaatccctctttttgggggtcttctctttctctccaacatttttatccaggtgaaacccagtgaaaatgacatgccaggactaagagctgaaggaagatggaagagctaagaaattaacaaaaaggtaccctgtagcccgcatgtaagtgggtgggtttatggtctaatgagttttagactcaaacgggcagtgccagtgtcgtcttctctgatcactgcctctctcatgcactgactaaacaagtggtcctaggtacttactacaaattattttgtcattactatagccatgaataagttttaaaatatttaatttcagatcatttttcataacagaacattccaacgagcaggtttattaggtttagggttatcaacctaagctgattatcttaaagtgaaaaagggaagaggatgaaaagagctacagtgaataagctaaggataagcagaaataaatatttgtttcccttatacaagttctaaggcagaacatatttctttggctacattctgattctggaatgaacagctcaagtgagggaggaggggatgggaaggagaaagcaagcagaagagaacagtcttatttaactgtttttatgtgggtaaaatgatttgtgccacagtatttccataagaagtgggaccattattttcctgtagaaacacatttggtttgaaaagtatcactggacaggacgtgaaaatcaaaccaaatgaattattcacaacctccgatcagaggtgatcattatttctgatgctccaaacagtgattaggattctgccctgagatgtcattttctcgctgagtaacaccagcgatacagaaaggcattatctatctatccatatatgtattttttctgctgggaggaccttggtttaatgttactataacagatagtgaaaacatgataatattaacatttattctgatggtgcccataaatgccattagtctgacacaaagtgtcaacactaatcatgacccaaaattaacaccaaaattgacatcaacattaattgtactatcaatgtgaatagaatgtgcaagcacacacaggcacttcccaaagctgctgttgttactacaaaataaaacaacaatattaagctcaacaaagaaatttgcaggaaaagctaagggcaaaacatgccaggattttgttttttaagggtgaaagacatatccatcaactctagctatgctgtgggaagcagaaagagaatatctttgccacagctgcctttcttacatctccacactttgacttgagctctaacaatacctttccatacagatttaaatacaggttaggctgtggctgagatgttgaagctgtattcgttatattcatgctaaaagccttgctatattcatgctaaaatgatcttgagttttttttggaagagtctgtaaaacctattgttctaattctgctaatgccaggaagatgactaccctgcaaggcccttgagcagcaatacaaagaatccaagcatgttagcgctaacccagacttgggcatcatctgcatcataaagatgagaaaactaagatccagagagcaggaatctgaacttgagtcccttctcagatatataacaaaatgttacctctttcccccttttgtatcttgtatccaagcatgaaaaaaagagtttttcagctcttaagaaaattattttgagctccttcacatgatcacagaacactaaataatagaacattgatatctggcaaataatacaatatggaaaggcattgacatatttttcagcatggcttttccaaatggcacaaattaagtcaaatattgtattttaagccttatggcttacttcaaaaatggctgaacaaactcacctcaacctctctaaacagcgataaaagggtaagaaaaatataacttagagcaaaaaattttcatcccagaggtaattctttgaaaatgttatcaaagattagaaataacaattttgaacagggaaattatttctccctgtaacatttatatacatgaaaccacagtaattttacacatgtacacacagtaatttaataagcataggaattattttttaacaaacatgcagtggagcacatagaagccagcggtatttgagaaatggggcccaggattaattggttggtatggaaattaaccaagttggcctactatagtcccagaagccttgtccattaatcatacgaatgagtgctgaactctggtgccccccgctactcctcattctctggtgtcatctgttgctgtcctgatgttcattattgcctctggttggagctgtaaagtttcttgacatagggtactatgtcacattctttttcagtaaaatcttacaacttaagacaggtataaatatgctggcaagtacattcttttgtttgaaggctatctctagacttatttttgaaagaaactgaggagccctccacaagtactactttagtgagccagtggatgcattaggattttcaaagtcaatcaaggttactgagcctcattttgctatcaaaaaaatgagtaaaaactactcaacctgatgagaaatctccaacaccaataatagtcattcagaaggaattctgagaaaagtatatacatcccaaaagaacagtgtcagaaattcattagaagtaattccatggtaggaagacttatttttcaaaattagcctccatatttttctaatgagggatccaagtttggtttggaagatcattttagacaaagacttgcagccaaatatacttacttagaatgggaataaaagaacaaaaacatagaattaacataaaattatcttaccatatatgccataatatatctttctctatacttaatctcaaggattcaaaattgatttttcaaagccttgatgaaaaataaggcaagcacaaattatgaatacttatgtataatcataatcatttatggataatcataattatacataatcatatgtatttgacccttttctgctgaggatcccaaagcacttataaacattctcctatctttagggacagattaatggcaaagaccctttttataagttgaacaatcaatgcatagaccatggtcctgttttacagacccgcttcgcttaggtctatttcagaactcaccttcagcatagtacaatttaaatatgcctcttttctaacacatatctaaaagactgacactgactcaatttctatacacagcatgaaaaggcaaactgatttcaaaagaatgaaacaaaagcaaggtaaagtacatccaaattagcatcacattcatggagctattttgaggttaaattgagtaaaacaatttaaaaaatctaatgttaaatatttgggtcctgtgttcatgagaaatggcctacccttttctcaccaccaaaacccgtaagcatatacacactctctacaggcagagttttagaacataatgctttccactagaatctgagtccaggataacccaagcaattcctttgagggtatggaaaatgtcaaccaagtgaattaagacagagggttatggtggtttttctaaaataagaggtcctttgggttaagaggtccagcctaagaactgtcaaaatggatctactaattaatttcttctaatcttttaggcttatataagcttaccaacttcctttccctaccaactcctaaattgtttttttgatactcaaattagagattcaaaggattatagtaacatgtaagtgaggagcccagtcaaaatggtaagatttgtttaagctggtcagtagatgcaggggtatttgtcatatcactgtgtatttttttatatgtttaaaataaaaaaattaatgagatgctatactttgggagacataggatatcagtacattgccaacaattaaaacaataattaaatatgggtattagttgggctagcagttctaaaactgaacccctaatccccactgtccctaccatttcacccctgagaacataaagcaggactaaaaccaaaataccagtcatgatggcagctagtctttttttttttcagccagagtctcactctgtcgcccaggctggagtgcagtcgtgcgatcttggctcgctgcatcctccacctcctgggctcaagagattcctgtgcctcagtctcctgagtagctgggattacaggcgcctgccaacacgcctggctaatttatatatatatatatatatatatatatatatatatatatttttttttttttttttttttgtagcgatagggttttgccatgttggccaggctggtctcaaactcctggcgtcaagtgatccgccgaccttggtctcccaaagtgttgggattacaggcatgcgccaccgcgcctggctgtcagctagtctttaaactttaatttacactactttatttcctcttcaatcatcctcttctttaaaaaaaaaaaatagatccctaatgcaaggttcaaaggatcttcaaccaaagagttaaaattgcaattgcttattgcaggaacactaggtaaaggctactataccaactgaaaaaagaaggacaccagtgaatctgcctcaacaaacaaggccactcacaaggctcatgtgaatgctaagctgctgagaaggaaaaaccctgacacctagcgcccatctgaaaaaatgaaggctcagagctaccacaattcttaagagtggtagtgtgtgtagaggtgaccatcaaattgcattcaatttttttttctttttctttttctttttttttgagacggagtctcactctgtaaccaggcttgagtgcagtggcgcgatctcggctcactgcaacctctgcctcccgggttcaagcgattctcctgcctcagcctgccaagtagctgggactacaggcacccgccaccacgcctggctaatttttgtatttttagtagagacagggtttcaccatgtgggccaggatggtctcgatctcttgacctcatgatctgcccgcctcagcctcccaaagtgctgggattacaggtataagccaccacgcctggccccagttgcattcaattttcaatatactttcctcccagaaaaacttttataccaagaattccagtctctgaataccaaccccttttttggatatacatcttgtacctaattattataactgcttccaaatacaacatcgcaacatcgtcttctcatctcagtttctcattatgacaggcatgatgagacagaatgttaaaaagctgcccatgttctgatatggtaagaaaaacagggtcctaatttctactagcactaaagttactatggtagttgactctctaacatatctttcagcattgcccactttagagattactggtctagttcgcagagctgataaaaagaaataaaataaaagaatgctagtaacttatttcagaataaacaagagcatagtctcaagaaggctaggattttctttgtcctaccaggcaaagttaagttgttctctgtcaagtccgttacagcccttggcttgatcttagcctgagctttttaataacaggatttagtgcgaaaagcagctgtactggattgcgaactgttactcaaaatgtccccacctgcaattatagcttccaccaaaagatcaaaacaggttagtaaactggcaggaaaatgaaaacaattcctccaaaattgagaagtggtaaagcagaactgttggatagctgcatttcttctgtatccaggctcaacagcacacattcatctagctgtgtatttacatacagtgcccatcactgtaccaacacagcagctagaaatgagatccgtttagtctatgctgcaatcacattttcctcaattttcatctttacttgaaactattaagaaaaatcttggacaactcatctttggagctatctgcaagtaacgtagttcacagatttagtctacatcttttttattcctactctaaagtcatactaaatgtaatgccattcaaatatgacaatgagaaaaatgtgttctcctatacctttcatcatgcattaggtggtactcctttagttacatctttctttatggggaagggacaactaggaaaatagaaaggagacagtagctaatacagcatcagaaaagctctgtctcctgctctaaacacaggcataaatgttcaaaatgcaggtcacatctctactgaaacagccaatattcctcctcaaatggcaaagaagttacctaaaactaaatggaactgaattggtccaagtcctggtcccatcacctttttacctatttactgtcctggaaaaaaaaattagaaagactggccacccatacagccaatggtctgataagtgcaggttttctgccttcgatcatggagaaaagcacctcaattcatgggaaaactctgaaggaatctctcattttacccttactccttacatccatgtgctagttttcaaactcagaaactccaatccttgaaggtaatgcaataccacccacaatgatgacctggtagagccgtcacttttggagaacaccacattatgatgatttaatgtctacatagcaccaatgcatttacattgagccttggctttcagaacattaacaggtcaattttttattcttttgtaataaaactatttctcaaggctctgtccagatgcccattctctttgggacaggacagatttactccaaatctcatcagcatgagctctgttcattcccttcacatcattcttggggtaatatgtagagtgccaggctcatgacaaacttgctctttggccaaagaaaattaaaccgcaatagctgaaagtcaacttgccctgataaaactgggctcagcacgaggaaatacatcctactgacactttgtcatctcttaggcacagctgtccctcagagttctgactgctgaaactccatccttagattggtcagtctctcagtggacatgctccattgtatgttcaagctattggtagcagagtttgatactaacaccccaacctcattcctgttgtgcagtgccctataatctagctaaggccaatgactgacttcaccagccatcctgggcattagtcactaactgctcacaaaagaacatcagtctaactcctcccaagctcaaaggctcagaaacagcaagctaacactcagcctcaatcctagtcaatcatttgaaaagaaaaacagaacaaagaaaataggcaactaaggagggaaaactgtagaacaagaagaaagtgagaactgacaaaaactcaaaatcttttgaagaaatactattcactttctggtttcaaaactattaaagcactggacaaaggaaaacatgtggctcctatactagatctactactagtcatagctatagtcctatgcaactgtttaagacatatcttttccactaaggtttgttaggtcttaaaggggttaaaaaaaacctttaatttttaaaaaattcgtgtgtgtgtgtgtgtgtgtgtgtgtgtgtgtggtctttgggtacagaggcccgtataataagactatttgtattcatactggcagagtaaacactacatgttcatgcccaggcagctctgtgcttgtaatttcagcaagaacagagctctgtccctctgggacttcactattccctgagtctccattcgctcaaacacagaatgagggcagaaagaaagcaggaaagaaagatcatggcaaggggtttcacacagcactgcagctagctttcacgtggccaaaaatctcattttgtgttttaattacattagttaaaaccattttgctctcagccccatgttcacaagggtgccttccattcctgaagactacactgttcaatgaatcagaatttaagtctagcacaatgaagcttttctttgctgctgaggggctcactaggcagatgctacatacagtggcagaaacctctgtttcaacttcgtgtgctgatgagtatatatctatgcttgtcaaaatgttttgcatccttccaccccagtcctcttgactttgctatttgttgagactcctacaagtctgatactctccatctggtccaatgcttgcatccatcttgataccaaatcatctactgttggcatccactggcatattactgaaatagccacacaccttgtatatatagtgaaattttttgaaaaagattgagcaaaatagaaacaaactgcttattatttccaaaggtctacccagcctatttgtggtgaaaacacaggtaaagattactccttcaatggaatgaaatctttctagggattatatttaaggttgaaataaaaatatctctctttttaggtttgttactggtattatcattgttataactgtacattaggagcacagttaaaatcagaaagaatcataatgcatggacaagagtataagagtatagggcaaaataggactttatatcactattcataggttactctgagagaaaggatgccaaggctagaaaatgcattcttgggataattatcaaaaaatgggttctttgctacattttttatgtttgaacccctaattctgattgagccccttcaagaacacatttatcatgctcacaacagcaccagatcaaatgaattgagcatggagaagacactgaaaaatgcatttattaatatgaatccaaataagaaaaaacattaagcaaaacaatactttaaatgttttcattatagaaaatcctggctgggcacaatggtgcacacctaaaatcccagcacttttcggggctgaggcaggcagattgcttgagctcaggagcttgagaccaacatggtgaaaccccatctcaagaaaaaaatacaaaaattagccaagtgtagtggtgcacacctgtagtaccagctactcaggaggctgaggtgagaggatcacttgagacatggaggtcaaggctgcagtgagctgagattgagccactgcactccagcctgtgtgacagagcgagacaccatctcaaaaaaagaaaaaagaaaaaaagaaaatccccaaatttcacacatagacaaaaacagggaaaataatctattttcatgtacctatcacctagcttcaatgatcaactcacgaccaaccctgtttcatctacacacccaccctcacacctctttatttagaagcaaatcattgcatctgtaaatgtcttagtctgtatctctaaaagaaaacaatattcctttttatttttttaaaactgagtcctttgtgttaaaacaatactattttaaaaagcaaaatcataataccattatcacacctaaaaaattaataatttcttgatactcagtcaatgctctctctaaagaactctcccaacaagactaccatgctccagtgctatttaatgaccacctcacagaaagctggtactagtgggcacagagataagaaagggaaggggggtttcaactacttgcctcatttcctcctggaagcctgttcatgtggaccagctgaccttgatcatccagtaccagttcagtgtaagtcagcatgtcagaaggcagagggggagatggaagaaatgcttgagtggacatagactcccagagtttgatcagggactagtggagaaaagaagtttgactaatcagtcacaataatttcaatatagacaaaaataattattaagattcagtcaatctggttttgccttcttttccaagtgttctgcagagtgtaaacattagactaaattctccagctcccattctcagttaaaatagatttgtaattactttttacatgccaaaagtcaggcacttttccaaaaagtcaaactactgagtgattccaaatcagcaccagagcattaacaaacaggaaagacctaacactatcctaggaatattaaaattaaaaaactaaataagtagcatcgactccttaaaacaaagaaaaggaaaatcctaaagaaacttgacaacaaaggaatatccaggaaaatgacatgacgctcagctaataaaaagaaaatccaagaaggccagaatgaagcttctactagaaattccagggaagaaacctctttctaatatttttcatagctataggaccacacacaggaattagctcactagatgtgtgtgactatttgtaaatgtgcagatcaattctgctcaattttgacacagacataccaattcatttaaaaaatattatgatttccatttccaacttcctgtaagtaaatcctttgtgaagtgggagctaattcagctctttctttgcttgcctcaaagcaacatttgaatcccaagtgactcatacatacctatgtgtcctaatcactgtgtttatgcctattatataggaagaattacttagaatgtgatttatattatatttatatagaatgtgatttatattatatttatagcactggcattgggaaacagaagtaacactcagcttttaggctagcaatgctataaaagggaaataccgaatgaaggtatctttcaggagacagaacttgtaaacaaatggttgcataaaggtaatctcttgtatttgtgaataacacaggaattctacacagactatttactacggctacatatattactttactaaaattcaaatgtggtaatactggtagtattgactaggagacttggaaaaatcctatattcatagatttttttaaaaaggacaaattcagtattcttttgataccttattctttactggttgcattttctactggtgatacacttttcttgccttctattgatagaagaaaaatctgcagcatagagatgattcaccatacagattgaaagaatttgttttcatatagaggctgagattcataatgtcatattttctcatgctagtttttattcagctataacaaatctcccacaaaagaacttatactctaaactgtgtaccatgaactctatatccatttgtctatgctatctatattgattctcatcatattaatctagggtatcaactaggaaccaggtttatattggaaaatgagaactaaagtatcagatctcctttttaatatccataatttgaatatagacttgggaaatacacaggtaactcttcacacaagtcactgtaaactatcaccacaagaacataaccttagtttactctctcctgtctcctactcaatagagacttctattctcaccattcctctcattaattcataaagaaccatccaatatctgagttggcagtcaccaatcctcaaatgaaatagaaatgaaaacagtgtcaagatatttcttgccctttggagtgcccccttctagccaaaaccgcatctgatggaaattcagggaaaccttgcctccttagaacatgtcagaccctccagttaggcatcttacctgccgaaacatctctgggatatcatatatgtatgttgtccctaaggattgtgcctggaacctctttgattgcagcaggtctttggtcacatatggagtattgattaacattccatgcagtggtccctgtttgtctccatatgcctgaaacatgatctgcaggaaaaaaaaatggcatggggagttaagagacagaaaaaaatcagagagctgcctagaggggctttttttgcacaaatattatctctttgaaaacatttttggtaggttgagtagctgagatatgcctcttaacactgggtacttggtgctctcacctctccacagattaaccaactccaaaaaatatatatatataaccagccatataccataactgctctcacttttagattagttgaaatcaacaagaaagaaggccaggcgcagtggctcacgcctgtaatcccagcactttgggaggccaaggcgggaggatcatgaggtcaggagatcgagaccatcctggctaacatggtgaaaccttgtctctactgaaaatacaaaaacattagctgggcgtggtggtgggcgcctgtagtcccagctactcgggaggctgaggcaggagaatggcgtgaacccaggaggtggagcttgcagtgagccaagattgcgccactgcactccagcctgggcaacagagcaagactctgtatccaaaaaaaaaaaaaaaaaaaaaaaaaaaaggaaataaacaagaaagcacggtgcacatttcgcatctcaaagacagactgaccatgctagccatctaaagtgagttgaatctcatatactcagaaatgaagtacatcaactaaccagtctgagcagccctggtattgaagttgaagaacagctatgcagtaaagataattctcttctttcctcaatggcagaaggccagatcaagactctagtatatcatctgtgctttagtcctttaacccacttgattagatggtacttcataagtattactagctatgcaaaggcttcaaagatttctgccagaagtggatttcatccatccatctagatagttaattctcactagcccatgagacacagcctcatattttacatatagtaaaataaccatattatattaaattatgtatattaaaaaacatatatatatatatacatgtatttacttctcctcaagatgctgtctacaactagtgaatagctcctgcaatacctatattgtcacataatgaaatcactacactggtttttaatcattttaactcaaatatttctagaggagtgcttcatactccatatatttagatagttttatttgcttatgaatatttataaaggatgccattatttcaattcaattaatatttattgagtgcccagaggttgtataacactaaactaggcacttcatgcatggatacataaaatataaattcccagtgcagtgaatacaaatggagattgggatgtaagggtatgtgtatacctacatatctattcagacctacaaaataagcacaagtctaccattaatgaatagattgtggacctgatatatatgcacaggaatagaattaagtaccttcctaaatcgtgggtacagttcatctgtaaatccttagccccttagctcagaggaatgaatgttctgctaatttgtcaatcaggtcctgttctggggaaaacatgtctcaggctgttttaaagacccagagattggagctcccagtcctcttccacaagatcaataggaaaagtcacccggggggaagcagaattagtaatgtcttaggaatgtgtcagtaaaagcaataatgttttaagagattcaaagtgttaagtaaggcaagggtacagtatgagaaaactgtactcagagcaagtaagctgaatcaaaataagaaaatggggtaaacgcagcaggttcctagaactacatttctcgtctgttaagagagacaagaccttgagactcggtttggccaagctttgtgatgaagacaggctggtcatagttaagcaacataattgtgcactgaggaaggggattggagaaaacaatctagctacatatgtatattgctggcagaaatttaaatggtacaaatattttggcagtttgtcaatatcttataaagttaagcatatgcttactgtgtcccagcaattacacttttacgtatttacccaaaggaaataaaaatatatctacacaaagatttgtaaatgaatgttcacagcagctttattactactaatagctcaaactaggaaataaaaccccaaatgtccatcaacaggttatcttggaaaattagacaatgagaactagagggccgggcgcagtggctcacgcctgcaatcccagcgctttgggaggccaaagcaggcagatcacgaggtcaggagatcgagaccatcctggctaacacggtgaaaccccgtctctactaaaaatacaaaaaaaaggctgaggcaggagaatggtgtgaacccgggaggtagaacttgcagtgttgcagtgagccgagatcgtgctactgcactccagcctgggcgtcagagtgagactccatctcaaaaggaaaaaaaaaaaagaaagaaagaaaagaaaatgagaactagagtttcagtccttttttttttttttttttttggagacggagtttcactcttgttgcccaggctggagtgcaatggtgcgatctcggctcaccacaacctctgcctcctgggttcaagtaattctcctgtctcagcctcccgagtagctgggattacaggcatgcgccaccacgcccagctaattttgtatttttagtagagatggagtttctccatattggtcagactggtctcaaactcctaacctcagctgatttgcccacctcggcctcccaaagtgctgggattacaggtgtgagccaccatgcccagccagtcttttttaatatccataatttgaatatggacttaggaaatatacatgtaactcctcacacaaatcgttgtaaactatcatcacaagcatgtggtcttagtttactctctcctactcaatagagacttctattctcatcattcctcccattaattcataaagaaccatctaatatctgagttggcagtcacccatccccaaatgaaatagaaatgaaaacagtgtcaagatattgcctgccctttgggggtgccccttgctagtcaaagctatatctgatggaaactctggaaagccttgtttccttggaacatgtcagagctcccagttagtcaccttacctgccaaaacatatctgtgaatataaacattttgataaatgaatgtaaaaatttcgataaatccattaaatggggctgggcatggcagcttacacctgtaatcccagcactttgggaggccaaggtgggagggtcccatgaatccaggagtttgagacaagcctgggcaacattgtgggaccctgtctctaaaaaaatttaaaaactagctgggcatggtggtagacgcctttagtcccagctacttaggaggctgaggtggaaggactgcttgagccaaggaggtcgaggctgtggtcagctatgattacaatattgcactctagcttgggcaagatagtgagaccctgtctcaaaaaaaaaaaaaaaaaatccatgaaacggaatactatccaaaaatgaaaaggaacatacacataatctatgcaacatggctgaacctcaaaaacattatgctgagtaaaataagctagacacaaaatagtacacactgtttgatttaaattctaggataggcaaaactaatctatagtaacagaaagcagatcagtggttgcctaaggccggggttggtgcttctacctttgactgcaaaggcgaataagagaactttctgcagtgatgtatctaccacaactgtgatagtacttacacggtgtatacatttgacagaatgaattgaactgcacacacaaaacgagtccattttattataagtaaattgcacttcaataaaggtgttatttattatttttagaggcagtgtctcactctctcgcccaggctggagtgtggtgtcacaatcatagctcattgcagcctcaaactccggggcccaagtgatacttctgcctcagcctcctgagtagttggtactacaggtgcatgacaccatgcctggctatttcttttttttttttttttttttttttttttggtagagacagggtcttgccttgttgagctggctagtgtcaaactcctgggctcatgtgatcctcccaccttggtctcccaaagtgctgggattacaggtatgagccaccatgcccagcccaaagatgattttaaaatgttatttttcttttttttgagacggattcttgctccattgcccaggttagagcacagtggcacgatctcagctcactacaacctccgcctcccgggttctagcaattctcctgtctcagcctcctgagtagctgggactacaggcccctgccaccactcccggctaatttttgtatttttagtagagacaggctttcaccttgttggtcaggctggtctcgaactcctgacctcaggtgatccatctgccttggcctcccaaagtgctgggattacaggcgtgagtcactgcgcccagcctaaaatgttatttttctcttacactgcacattggaaatcaattcacttatgcaatggattacccaaatctcttctccccattatgactgcctgacatcagtgttcattacagcctatactacaaagactgtacaaggaaaatgaaaaataaaactcaagccaatcaaccttgttccttattggcagaatgaataaatgatgtgctagggcaagaggctgatagtaataggagttcctgaatactcaactatctatgttagttccattttctactataatgaacgcagtaactaaaaactgtaaagtatatgttttagaagttcatgaaaatatgtacacattttatatatcacacacctttcaccagaagccatcaaaattattttagaaaataatttctgacccatagtctgctcccttagaacactgtatttatttataatagcacatatttgccacagagaaacaaatcatttgtcttcttccattgtgatgtaaatttcttgagtacagtttgctttttctctttatacgcatagtgcctgacatactataagtagtcaatcaatattaaattaaaaaacaaatgaacgaataacagacatggttctgtattaacttcatacaatgattcattaaagaaagggaaaaacagtttgacaataagcaccatgtaggcattaggagcaccagaactgggttggaggctgctccttttgtcagttcccacgtctagccacaggctcaaaagttagttcccatatggcagtagctcttgaactctctcaagtgaagagtctgtagaagacctcttccttcagggcttttaaaatatgcaggaccctaggtaaaaagcgttttccttcaggttgaaggtggtttgttcattctttcagatgcttattgtgtgcttattttgtaccatgtgtaatactaaaccctgattgaaggcatctgtgcctttcacactcctgtgtcaccattagctagcatgagggaaatctcagagtttcctaataaaggaaaggaaaaaaaaaaaaagaaagaaagtagttatgaagaacaaacatatttatcaaaaacattaaaatctcaagtggccatcttacttttcacaagaatagacctgccttgaagctattgtagaagttaattaaaaacatccctacccattgaaagctttgactgaaaatgtctttaaagttgcactaaaaaaacatcaaatacagcaaaaaatattgaacactctttctcttggtcaccactcacgctcttgcgcactctctctctctgtttttaactgctcacttctcataggatagatttctctagccacctcactaggaatcaaagcacaaaatgaaaggtcattctgactactgtccaaactgagatttttaaaaattcatcttcaaaagactgaaaaatatattttcctgactctattcctggatttaaaaggatatagataaaaacaagagacacataatctctccctggcacccaaagcacggaatagactgaaacccttgtttatgtatactggagcaggttcatcctttaatcagaagaaatgcaattcttgaattcaggccaaagccataaaatatcctagttcttcaaaaatgtgaacaatggtgaaccaacctaatttcagtatcatagtaaagagcccaaatatttagaaaccaacgtagtaaaaaagattaaaagggaattctctgtttcacagaattagtgtactgactcactttctatttttacattctcagttttcctacctgaaaacgggtttaaatttgccactttgctcttgtataatatatgacaccctgaaatctttgaaggaaagggaacaacataatagataacacaataaatatgataaaaacagaaacagaacacaatagataaatatgatagacactgatgatggtagtgctcatgccactatactatgttgaaattttccttctttaacatagaagttggtgacataaatccaacaattctcttttcctcacttgccaatgagtagtttaattatggtgaaaacggaaaggacgcatcagaccagagattagattgctgaaataacccacgagccctctaaaaaaagagcctaaattgcagaataacctctggagtcaggttcacttggcatctgttagtgcttaccaatacatgacaaatggttaagggttttataacatccatgatagagaacataggcaaatcttataaggcagatgaagtttttcaaattcatacaatcatttaatcttatagaggataatcccaccaggtgaaccaatgggatttgtgagtgtgggtcttctataacaaggacgagtgtcttatctgtaggaccaaatcaaaactctgaggagcctgtttgagtattgtacctgtgctgtcctggagtcagtcacttccttgtataggctgatatccaagtaatagccagactcgtttgtcaggaagaggcggatgggaattgcttttccagttggcgtcaggcgaatgttgattttcagttctgcctggaggacgcgcaatttccacaggcgacttccataccgcattaccatgctccgcacggattcctcaatctgacacagacacatcaccaagcacaaaacttaaatatcttctaactaagacctgtttcaggtctgctcatatttgagaaagaaggggtaaaaaaaaaaagaggttggtttgtggagatgcacaccttacaaaaagtggtcagatagtttctccccaaactattctttcttggaacaagtcagggacaatttcatgctggcctggcatttgagtggttttctctcgataataacacccaaatctctgcaactccttcccctttcccaattatattcatattctatatcaaagatctgcagtatctaaaattacaagccatgggatttaagaggaagccccaaataagaataaaatctctagttaaatagctattaagtagcatttatatgcatggtaactatgtttcactgcacttacaggactttaaatcaacacagcaattaccaccatgagctttttttcatacagttttattaaactttataatatatgtctcttggtaaattgcacaaattaaagaaaggcaatttgtaggtggtgctagaacattctctctaaacagagctctgaagcttggccactgctaagtccacctaggatttaataagatggggcagatgttcccacatttctctaagtttataccaaggcagcttaatgctcttagtttttaggggtaggacagttattttaactaaatggccttagacatgatttcttgttatttacatgctaaagcaaaactttttttccccaacatggctgcacagaacataatgcagctagaacatgctattcgaacttaatgtatccttaaatgaagtatctttctaaaatgcttcctcaacttcttagaaaatctcaagaatatcttacattccctttctcttgtggttctttagtagcatgtgccacccttgcagtttgtttctgcaccacaaaattttaagttagaatgaatttcagggagttaacctctctattatcatacttgcttgttaaccaagagatatttacccattcttttcttgagggaacaaaagccaacaatctttatgtacagaaaattggcagctatctatcattagaaaagcagagccagtgtatatgggtggttagaatgaaagcagaggctgatctgaaaaactcagagaaaaggtaagccaaatctaaaaaaaaatacagctgtacagtgtccatgccatgttttaagtttcccagcttattagtcccagaatgcttaggagaagttttgcttaaactagatgatgagatttgagtcaaatgagtagccctgtccttggcgttccttacaaactaaagcaacccatcattagcttggaatttttaagggaaaaaggtagaaaactacttctcagatctcagatactaagttcaagaagcaaaagtctaccaggcatgatgactcatgcctgtaatcccagcactttgggagtctgaggcaggaggatcgcttgaggccaggagttcaagactagcctgggcaacatagcaagaccctgtttctgtaagaaaaaaaagaaaaagaaaaaaaaaaaagcagcagcagcagcaaaaattcatgcctacagctgatcttgaaaaagggagatactggttctcctatccaaattccacagtatcatgatagaaagagttagaaggggccaggcacggtggctcacacctgtaatcccagcactttgggaggctgaggcaggcagattacttgaggtcaggagttggagaccagcctgactaacatggtgaaaccccgtttctactaaaaatacaaaaattagccgggcgtggtggcacatgcctatagtccctgctactcggggaggctgaagcatgacagtctcttgaacctgggaggtggaggttgcaatgagctgagatggtgccactgcttcagcctgggcaacagagcgagactctgtctcaacaaaaaaaaaaagaaagaaagaaagcgttagagggagcagaaacagagagcagcctgtctttattacacttgggataaaaggtcaagtacaaaatcaccttgtttttcttccttaaattatatagaatgcatttcagaatagaccctcagggaagaaaatatacataatacatgagaaattccttatcagccaaattctctccctgtggaaaaacactaaagagagataggttagacactttgagaaggtgcattatctcactaaggccaccaggtgattaacatttagtgcacagaagcagtaatttagccaaaatgcttagtaacagtaaaattaataattccagatgagaaatagtagggaataatacaaaacaggaccactattatggcaaatataaaataggtaccaacaaaagaaaatgttttcatgtttttgtactgcttataagtgaccagcaagctaacaccaaaaccttcagttttgagaactgttttttcaatggctatatcaaatttttgacactgtcccagaaactcaatcttataaacattctataaactttacagattaagggctcaacagcctgaacaaggagtacctgtttccaagtccaagtgagataaatatgaatgaacttctgtgcttatgcttgctagtgctgggagagaagctaaggagaaatgtacctttgatgggtccatgataaccgtgggcacaaagttgaggaagatgtggttacagtcagtgcggacatttgtattgttaaaagcaacttccaactcatccatggcttccaggagtagccgctccccttcattttgcagatattcaaaagaagcttcctatacaggaagaaaataatcaacattaatgtagtttaaaagaggcaataaagaaatggctattataatcacttaagcagcagtatatcatgaatcataaggcacttggtgaagagattgtttatctttctccctagagtcagtccagtaaccacagggagcaggggcaggaaagggccagataaagagtccatgtcagcccttcctccttacttttagtgcatcattcccttccaagaggtagaaatactgggcatccccatagctgtaagttcaataggatgatatttcacatatgccaaacagagctatttagaaaggaaaagctgaagaaagggtacggctatgggatataataataatgaacacatcaggaagtgccttgctatatacagacactacccatacttctagacaggtgtacaatgggatcacctctttcctaacttatctccttatgctctaccatcacccaattcttcctgtgatttttctgtttgtatgctttttcttttcttgagtgttattatgcttctgctaccaagaaaaatcaaattaaagtggaaaaagagccttcattttttattttttttcagatgcactttctgctttgtaaaaaaaaaaaagcctttattatatgaaatatttacttttgtaaacattgaaatagaacaagaaccttgattcaaaaaatgaaaacctgatcttttttttatgttctctctcagcagaagcataatacctaattttgaatcatatctattattctgtcccttccctcagggataacatcccattaaagtacagcacccaccttggtgaccagatcagaatgcctgatgattgcacgaacaaagaacctgtagtctgtcacttctgtgcccacttccaccttggctgccccgagatacaggtgcatcttgtgattagcacatggaatggcagtgaggtcaaaatttctcatccggttcagctctaactggaaagccagagcaggctccagatgacgatagatacgatcctcctcaaactgagtacaagaatcagagaaaaaacagctcacaagaggcagttacaaaattatactatgaatgtgaatgtaaaagagatgcctgaaaatagaaacataagctatgatgtgctaatgagcaacaaaaatgagctacattcaaggctaatgctacagcttacataagattaggcactaaagtacctattatataggtactttataggatgatattcctaaactttcatcatttatgattttacaagtggtgatgatatacatgaaaaacaaacaaaaaatcctcaatttccttagaactcctacaacatttaatgtctttatataattcatttttatattaattacaggctgcttcacattaatatctacttcacatgccaatgttttgagcttacccaactaatctaaaaattttctcacttatgataagtacaaaggacataataaatactcaacaaagaaacatcatacaattttttaattaaagagatatttggctttggaacactatatccatagatatataattacttatatatgttttttaaaagttgtattagtatataactttactgtatttactgtatatgtactgtatgtttcagtgaaactaaagtatttttctggaatacatgtcaattgagtgaatggagagagagagtcaaatatataagccggtaacaggaagaaagcaacatggtctgaagttttgtattttaaaattgaaaaacaaattcacataaagtagagttgagtatcagtgaactatttgtagataacaagaatggtcctttaatatcacatcattaggatcattctacaggacaaggatgatttggaaaggtatcaccttcgttgagtagctcaatacatttggttgtttcccaaaccaaaccctttcagaaaggaattggctttagttctaagacacatgtaaggcaacaggaagcacaagttcaataagagaaaaaagaatggcaagaagaacgtatggcaaagataagccgctcttgggcttttaagaaaaagtaatttttttttttaaataggaaagaaatcaatccttaccttatcccttgctcggaatgtaaaaaatttagggaattctctctgtattaaagaagggggaaaaatgtgtcagtagttcatagacatggctctttgagaacaaacagtatagaaacagttaagcatttagaagacagttttctagaaaaacatgcttcttacctaagcttagtccaggaaatatatatgaatgatcctccgcataaccatcactttgaccccatttccaaatttgagaatcaccacattataaacctaattttagtatctaccctctcccaggggaaaaaaaatgtatgaattttttaaatctcccaagtgaaaaaaatttttttgctaggtattgctcttggcacaacccagcaaataaaaccaatatacccttgtgccacagtcactgcaatagtagttaatggactgatttcccaagttactctttaagaaactcttaaaatataaactactcagacagtatagagtgctcagtccatgattttcacatttattctcaagtcaataatgtcaagggtttaaatgataacatttgaagatgaagaaaaatataagattctaccttggtcactaccactatatgtataggaaagaataaggttagaactagtgaacttgtaatcattaggtcttcctgcttttttgtagggcattatacaaaaaaaaacccaatttactagaaccttattaattaacaaagatgaattcaattagcagagttcattagtttctgaaatttaacttaccaatgccaaatacccctgtttctcggatgggaagctctactggcagtgctggaatcaaatcattactatttgcctctataggaggtttcattaggcatcttcttcattatgagtgcaatataatcaaacacttatcagtacaaggcagagagaccgggactagctgcctacacatcctcaatgagctttaggaaatgtgaaggaaacatggactgaaaatcttctggtggcaggtactctcatgtgttgtcctatctgatgctctcaacaacctctaggggtagatattgtgaccctcatcttgcagaagccttggctcaagtatatgctcagaatcacagagctggaagataaacttgggtctctctagtgccagagcccatgccctctgatctctcaagggcagagtattacctttctctttttattataatctaaattcctcatttagaggatttctctttgatgagacaaaaacacagaaattaagactttaaatttaaaaagcagaaagcaaacaaagcaaaactcatgctgtaaacctgtggttcttgaatttcctgaaaatttcttgaatacgttccataagtgttacacctcactctcaccttaactaaagcttgcacagttaataaatctttttatcttttccttggtattttaactgtaagactgcatttaaaaggttcctaggagctcatttaccaacctcagggaaatccttttttaaaagcctttttaaagtggattttacacaggactgaacttctcctcaagttttgttctaaataattctctgacaccccccccacccgttatgagagtgaagcacataggactgacttcaaggttaagtaagatgcattcagctgaggtgtcgataaatatcatgctcatggttttatataacctagttttggttttattctagtgaggtacagctttcagagcattacctaaaaagtaacaaatgtcaaaaaaggaagaatgacaaaatctttccatggaactctctgaaagaaaagtcaaggaaagtgataatatgatattttacgcacacacttttctattccgccttaactattattagctaattaattaaaatgtttgtttaggatgccatttatttaattatgtacatttataggatcaaaaccatttcctttcaaaaacaaaacagtaataaaaaatgctttcttttccactaaaccaattaagaaaatttgtagtaactgaaaggcatataaagcagtttgaatggaaatgcctttaatacaaataatgaagaaactgactaattcttggcagaggtgggcaatgactaccaattagaaaaaccactttcattaaggttagctaagaaaagttgtcatgagatcatataaacaactttttttttttaaacttctgagtaaatttgtaactccccggtaaaatcctcaatttaagtattaaacattcagaacaagagatggcaagaacctctgtgcaatggaaaagtggaactactaagcaattcttcagtgacatggaagtctgaagactcttacaaaaagtaatctcttttggcactcaaaaaccacagaatcacagaaaacacagaaaagaagaaatctaaaagtctgatcctacagttttagtaaattcttttatcctatctcatcctcatactgccagtttttccactgaaagcattcatgcttattccatcatcaatgtatttgctttccaagtattctactagtgtcatgggcaaatatcataattgaatgtacacaaagaaaaaccctcttagtattctggtaccaaaaaacaaaagaatgcaacgtttcacaggaagaaattatgcccttgctgtgttctaatcagccaaccatcatcaagacaatcaaaataatttgcccaaattagccaatcaagacaccccgcaaatcagagaatgtgaaaacctgcaacaaaaaacatcatagctgattatgatactaataatcgtgttaaaaacctaatgagatgaagaaattgggagcttgctggtacaattctcttttacctcaacatgctgagaactaattatatagactgtaattaaaacaaaaatccaaaccaacccttctgaaaactaatagttggtccactaccaaacagaactatcttaaaaaaaaaaagaaaaaaagaactactaattatgataactgctcatatagtgagctcttccttcaaggtccaaataatccaaaacatttcattttaaagtgggaatcacacaatagtcataaaacaacaactctctctcgggagatatgtagaccttttttttaaatctcatgaaattttacaagaacaaaaggtaacattttattaacagatgtaaaactgtttgatttagaatcttatcatggttttaggacttaatgggggataagaagaagtcctgaaaatttgtattccgatgtccttagccaaactttgctgaaaaaaatatggaaagcttaaaaaaaaaaaagcataatattatatcccaattagacagcactttctgctaaatattttggaattccagacctaaaatgtgagtgaaactaagacagagtgagtcaataagttttaactaacagaaaactgtggagttgcagtttagatagctgcagaaattcaagaagcctcttttccattcaagactttgatcttttttcttttttttaacatcttgtccatttttttcttttattttttattttcagatgaacatcatgatctactttattttttcttaacaagtagaatatatttacaaaaagagacttgtttttcctcaaagtttctgtttaaatatcaaagttaggcagttattcaaattccattatgggcacttgatttaattagatggttatggaaacagagtcaactcccagcctccttaacactggtgaagactgctgtcacagaaataatctccatgcagtgtcaacggactagggtggcaacagacaccctaaaaatgttttaaagctgtgggcagctatctgggacaactgtggctaaactacgaagtattgtaaatgcttatagcaatcactgtcatccaaatcagtacctaacaatatacacagctctctagcaacctctactctggccctcatttgtcttattctggttctgaggcaatttgaaagaccaacaactatataacagcacagcttgctttattccactaaccaatgtgcttgaatcaaacttggtaaacttcctcctctccttgctccctcaagtgcaaattctctcttccattcaataatatagggattccacagcattggacaggggaggctgcatacatcacagtggattatcaagaagccagagagatcaagggattcatctctgacactcccagaaagcttcctctttttcacagtacactaactatggggcaagcacaatcagatgacatgacagaggctaaataagcatccttcatgaatgtcaagctaccatcagcaaaagaactcacagcagcaccacgacagtgacccccagatttgtacagtttctgccaacgcttcctggctagtgtagatcctggattgtataatagattctggatggagttcggtttaatagttgcccttgcaccttgcaaaatcacttatcatttttaaagggactaacataaaaacaccccaactcctctgccattcaattcttcagagcaaatgcagtcctcacttaaaccttaatgttctctatgctctaaagcagcttttcctacactcatgacaaatcaagtcacttgataatttaagtgatttcccacttgatgccactataaataggaatcagacaatgattgtcacggaagaccccctgctggcctcattttctagccgattttgcctatacatgtccctattaaacctagatccagaaatatcaggacagcagagagaaaaaaatgttttaaagctgttaagtatactcttaatactagggcatatttataactatacactatagattcagagataagaaagggtttttttatgtgttacatatatgagaaaatgtcagtgagaactaatcactttggtttgctaaaaattttagtgaacagttttagttgatcagtgtatttattatagaaaccagttagtgtgctatagatgtgaagattccatctaatccattagcaaaaaggaaaacaattttacaaatttagtgttattccctagaatatgctgttattctaaagtcggtgataaaaagcacagtaacatttaagaacctagcacaatactcttctaaaatccagggcctggctctggcatgtctaccttagttctgatcagcatctaccagccacagtgtttatccatgggctttcatattctatcccaaagtatcaattttattctctaagctcctgatttttcttcctaaagccctagggttctttttaagctcctcatacttctccactgactccgtttcctatctaaagttattgattgacatatatctacactctgcttgatttcctgacatcaataacacaggggagtcatgcagtccacaacatttcctaaagcatttcagaaaatcttagctctcttgtttctctatagactagaccaacaaggtgaactgtatgaaggaaaacaaaatgtcaagtcttgaaaacctaataaacaaaaaggtaataaaagcaatcacacataggtccttgagtttagaaagtcctttccagaatctcaagtgccatcttcattgttgcaaacaagcaaggcttaacaaccaaattatcttaattgctaaaaccaaaccaaacaggctgggcacagtggctcatgcctgtaatctcagcactttgggaggctgaggcgggcagatcacctgaggtcaggagttcgagaccagcctggctaacatggtgaacccctgtctctactaaaaatacaaaaatcagctgggtgtggtggcacatgcctgcaatcccagctacttgggaggctgaggcaggagaattgctgcaacccaggaggcggaggttgcagtgagctgagattgcgccactgcactccagcctgggcgactaagcaagacactctctcaaaaaaaaaaaaaagaaagaaaagaaaaaaaagacttcttaacatcctctagaatcttagttagctacattagaatcaatttttatgaaatattttgattataatcagtcattttgaaaacaacatattgattccaaactggatttctggccttactgttgtcactgtactgggtatgatcatacgggtataccatagtttggatgccaggctattaacttaattctcttttcaataaaaattttaatctcataaatattaacagttaattcagttaaatgggagaataagcaacagagtgtttaatttttacttatttcctgttcctacgattaacataagacaaaaaatagcaacttggctctatcaaggcattttaaataataaatcattgttctttagaattgagacttctcaataaagaatccaagaccacaaaatgcaactggctgtccttgattattgattcactataagcacagaagaaattactagttagcttgtttctaccttatttatctggataaatgcttatgttcattcttaactatttctcagagatatattgagaattcattatagggttaaaaaaaaaaagaagaaaacctttagctggaacacttgatataagaattaaaaaaaatttttttttaattaatagaggactgggtctcattatgttgcccaggctcatctcaaacttgtgggctcaagcaattttcctgactcagcctcccaaagtgctgggattacagagaactgaatatttattataataatttctaaaagaagaaggatcaaatatcagtccagcccttctaacatatattctggttaaataatcagtggcagacaaataaaacagtaagtaatctttcattattgttcattttacttacatgaaatctccgatccacctcatagttgacctgctttctgaaatcctttcaaataaaagagagaaaggaaggaaagacagcagaagttggcaattagtaacaaaatcaaaaagaaattgagtaaaagatgatgagttaaactaatgttttttaaaaatgaaacttacagaaaagtggttatttctctgcataaatcctattagtaagtataagattacaatcccatttttattaagttgtagcagcagcataagaaatattaaagaggtacaattcacatgtcagtaccttttgtgcaaccaggaaagtaaggcgccggatcccatggtcaaccagggtagctttctaggagcaaaaacatgtaaaacagaagatagatgagatttccattcattctaaattttatcccattcggcccttgtaaggctttggtggagttaaacatcctttttggatatccttatcttagcttagtaccttcaaacttgcaagtgaacaaatttcaatctggctcctaggactaagtcttacgaaataaattttatattgatttggacaaaactgaaagagaactttgtggaggagaaagggtgatatgaagtcaactaaattacctcagaactgatttacataaaggtaggccatgacacaatttctgcttatagaaatcatactgttgggcatgtattcaaatgtaaacattaatattgataaagatgctaaatgaaattaggtagagagaaaagaaggactttccataaaacataaaacacaggtcctaaactgtttagattgtagatgttacctaccatcagatacagcatccctagaattcagtctaacaaattgtaacctttcagttttgatacaacagtccccccttaccttacatgaaggcattttttaaaaactctctcttttaaaattgttaaaagcaatatttaataggcctttaaatttaggaactattcatatctccactaggcataggcgactagtatattagaagtcaacagaaggctgggagtggtggctcacgcctgtaatcccaacactttgtggggccaagatgggcagatcacttgaggccgggagtttgagaccagcctggccaacatggcaaaaccctgtctctactaaaaatagaaaaaaatgagccaagtgtggtggcacattcctgtaatcccagctacttgagagaatgaggcatgaaaatcgtttgaaccaaggaggcagaggttgccgagattgcatcactgtactccagcctgggtgacagaatgagactgtctcaaaaaaaaaaaaagaagtcaacagacaccagtagtttcaagacagccacttatacgagtcttgggcatctggacctaaagccttcctcttccctatactgttcacttgcttcaaaaggcagggacaaagaaacaaattaatgaattaagtaaaagacatgtgtttagaggtccccaacaaagaaggattataacagcaagcagaaaagcaaccccaccagttgaatgacctgagaaaacatatgaatagtacaaatagaaaagtaatgtggactttcacagcctacatccagactttagtttgaccacatttcttgctataactccaaccaagagatatgtttataggccagttcttaacattcatgatattatatattttttaaaatttaaattgtcttccccttataaggaagcacattcttgggttatttcttccaatttcttcaattctgcgatggcattgctgagtaataaaattaattttattaacagcataaacaaaagataactggaaaaattaattttctataagcaaataataaaataataaattatcaggccaaatataaataaattttggtttaactgcattaaaaaattatttgtactgccatcacacaccttgctgtaaataaccaagtattgacacaacaatatgaaaaaaatgtgtcgaaggaaaggaggggtttctcagtgtggccaggaacagaaatacttcttctgacatcaacaaagattccactacagtcaagtccttcaaagacaagcatcagtagctatgttctggcaagggaagaaaataactttaataatgccatgatttaaaatcaaaattgttattgcttttaaaattccacaagtggctgacaataacagcagagcaacaggattctgattacattgtaataatgcaggtctcacagcaagtccacagctattacccagcgattaggcatcagcacctggagaaactccatttacactgactgcttcaatctcctccacaagtcatttacaaatatatgatcctaatttctatgagagaaaaaaagacatgctgggactagaagattatttggacaatttggatcaacctatttgatagtttaatgtgtgccttaaaaaaaaaaactttttctaaactgctaggagcatgatcatgaagtgaaaaacaaaactagttgccactttatcttttgtttttttcttaaattgcttttctttccttttctttcatatatatatatatatatatatatatatatatatatatatatatacacacacacatatattttaacaaggagatgaaaatgccaaatgtccctggataagcacagtacctgatgcagtaaatagcttctctatgcttagagtgtcagcacagtctacccttacctttctaaatagccttaggcaaagatattggatttctctgtgccttagtttccacacctagtcaaggaaaagggtaatttcttatttctcattaatgttacaaacatatgtagcgaatatgaagaaaatgctttttttttttttttaattgagatggagtcttgttctgtcgccaggctggagtgcagtggtgcaatctcggctcacagcaacctccgcccccaggttcaagcgattctcttgccttagccacccgagtagctggcgctacaggcgcccgccaccacacctggctaatttttgtattttcagtagagacggggtttcaccatattggccaggctggtcttgaactcctgaccttgtgatctgcccgccttggcctcccaaagtgttgggattacaggcgtgagccactgcgcctggctgaaaatgtctttgtagatcaacatgcgttgataagtatgacacttagatttgagggcaacaagaagtgtcaagttgtggtcaaattatggaaaaatactcaaacatgggcaattagtgcctcaaaacctaggaagaaactttcacagattatttcatgaagcagcagcagcagcagccacatataatattaagactcttccaggccgggcgcagtggctcacgcttgtaatcccagcactttgggaggccgaggcaggcagatcacctgaggttgggagtttaagaccagcctgaccaacatgcagaaaccccatctctactaaaatacaaaaattagccgggtgtggtggcgcatgtctgtaatcccagctactcaggagtctgaggcaggagaatcacttgaacccaggaggcgggggttgctgtgagctgagatcgcaccattgcactccagcctgggcaacaagagtgaaactccatctcaaaaaaacaaaacaaaacaaaacaaaacaaaaaaactcttccagcaaagattaccttgatcactggctttaggttaattttatgtggtcactggccaagggcaagaaggaaggtaaatttctgtctacagaaaaagccctaggcatatcccctactttcacttctctggaagcaccttttcctcatactgaccactgcaatctcatagttagtttaagtgctacaacaccgtcatggaataagtactaagactcatagtcatcacaaatttaccattttttcccctagatatctaccattggcattacatgatgtgaatgccaatggtacgaactgtctacaccactgaattaaattttgaaaacatctactgagttctttctctgcaagaagtccatgggctaagtgctgtccactccaagagaacacatgggtcttgccatcaagggcagtttaagaggacactttgctatctatcacatatcataatgaaatataactgtagattattgttttaagcatgcctatcctgtcccctcaactagactataagcatcttcagggctaagaatgtattatttactaaagtacctagatctgtgccccctatacctggcatcaaatccttaagttctagtatttgctctatcatcttctagctggtgacctaggggtcttaatttctctgagctccagcttttgcccatgtgtacaactggaacaattcctgacttatctaaccccatggaatcgtggtaagatgcaaataaaaaatttaggtagaatttttttataaataaaaggcattattattgctaataaatgtatgctgaccaattaggaattcaaaggaggaacatacattttagttagggctactcagaagtcctcactgaagagatgaaatttgagacagttcttaagacaaacaagatttagaaagaaaggtgaaagaaaactttctaggaaagaggaagtcaaagaagtataataaatgaggcacattagacaatgaacacaggtcttttcacaaaatagcaaaggctacatgttagtctctcaataggctgatgatgttgaagctaaagttaaggaggtattctgaaggtcagagagaatcactgttaagtgggaaaataacatggtaagagcacatttgggacatttaattttgtggtgatgagcagaatggaaactctttggagggagaaagtgaaggaagataagtagatcacaagtaagcctgctgcagtgtctcaggtataagatagtaagggtttgaattagagatggcagtgggaattttaaaactggaaagaagaaaaagagaaagggtaaaaaagactgcaaagaaaaactaacagaccttggtgactgaccagatacaaataaatatgtacagattgtgggtagaggggtagaatgaaggaatgtcaaggaaaaagtcaatgacttttgaatgattgggagtaaaaggtatagtgagttgtgaggttttttgttttgttttatgaggggattggagagggacgagaagaggtgaagcaaaatgatggaaaatgtccatttagacgatggcgtttgatgtcaacaggagatatccaagtgacgtaaaattgaaaggaggatagatgtataactgatagtttcaaaggaggggaggggaagacacagaagggacctaaggggagtttaggcttagacatgtggaaagtcaccaaaggaaaatacttggtaggtgattcgaagttcaagactggagctctgggagagatttaggaagataacttcccttaaaaacattttaaatatttgaggtctattatctgttgacacacaaagatattcattatatattattaagtcactttgggattttatccctaaatgcagaactagccatagttctgagagttatgataaaagacatagccataaactagcaactgataaaaggatagctatgatacacagccagtagaaaggggacatcacgagcttccacccaatcaagaacttacattttgctgggtaaattctctgaacatagctgccagcctgtcatcctcaatatcacagtcagtcttgatagccacattgagaatgtgaattggttcatccctgggaacctgtaactcaagaacacaagtcaaagaaattatgaggctggccaatacagatgcagatagaagttataatatttggtagaatacctgaaaaagagatacaccccacaggatattttggtttgcccagcagtaggaatgagcaaattgaaaccactgcccaatagccacagagagattaaatcaggtaaagcatataaattttaaaagataaggcagcagaggcattagtaacaggtggcccaatctttacttggcatgaagctgaagatcactatgtctcaccttttttaccaataaaatgggggtgaaactatttgccacatctcttcacagaatgtgaaggaaaatgagtgatataagccatctggacatgttcccacataatatatttccttacaatttatcaaacaatggaagtatcaaatcatgaaaaaataacatcatagagaaagaataatttatttactgataaataaaaagaaatgatttaataaaaagacaaagttttcaacaaaatgcctactttttttctgtaatctaaagtcctccattctctgaggactatgattgcaccactatgcaaaaatataagccatggctgagtaagaattccagcaaccaaagcccaaatccttaaaacaacattcagagattcagaggcagctgcaatggacatagctgagcccactctatactatggactccaaaattaatatagtttttttaagttaggatttatattccacttgtttccagaaaatactttggtgaggcatacaaaattaaatactataaagtggggtaaaaggatgaattctttcctataatagttcaaagtcagaaagatagtatacagtagaagtcccatgtctgaggggaacaaagcagtctcccaaaagggacattataccttatcctcatcataaagagacgtgtgacctgcctcagggaatgtgggactctggggtggggagtcagagaagcagcccatcacttcatcaaagatcctaaaaaatacaagagaaacacccaccatgaaaactcaagtggcatgaaactaacactgccattggcagctgagtctaaaagaataatctatcttagcctgggctcaatagttaattgaatagaatcaccagtggctagaggtgacatgcaaaatttcaccaagtggcagaaattaggaggatggattgtttaaactttaataaaccatatatattttttcttttttagaaagaatgatctaaagcttttttgtttgttttgttttcctcatatgtaagatatgagcacttctgtcatcatcggtcttaaagtaacagaaagtgtctggaactggagtagtgacagaccaatgtaattacccctccccctagggtaatgcatcagtatacatcaagagatagatgctgaatgcatttaatcaaaagatgtattgtctcttgtggggctcactctagtgttatgtttaatttctcctgacatttcactcatcacagagcagacagcttcttctgttagctccacaggaaaagatggtttttgtttgtttctttttttctgaccaggcccatactacaagtagaggcttgtagaatctgaatgagaggtagaaatgcaaggatatatacctctccaacggcatatacagcaagggttacatctttttagctggctcatggctattcgggagacctttattcattttgcagaaagatgagaccccaaaacacagatgtccatggctccccttgtacagacatagttccacaatgtcttacctgacaaaatcttcaaaagtccgaaaagagaccattccgcccatccgctgacaaggtggagtgaatgagttgtccaacagtacatcgctgacactagctacatgggtcatgccatagtggttgaggttggaggagaaggacattctaaatggtaattcaatcacgttcattagacaaggagggtaggagcaaggactgggaaagtaacagtagggaaaaggaactaggagaaaactctgaagtagggtcaggttgcagagcagatttggtttttttacccactatggataaggttgttttgctggattcatgttaaccctttcttttgaatttccctaaataaactatattttcatcactccaaaatttcttcaaataaaaagctaagaactgttaggaatttccaggcagttttaacacaattacattataagatgtccaatgaatgaatagcacataggggttaaaaaccatcctgcatcttccccctccctaaagcattccctcctttaaaaggaagtaagcaagccaagtgagttgtaactatgcaatgcttaaggcattttgttttctaggaactgtaatagagtaagtattcacagatacataaagagataggtatatatatgtatgtaaaacaacaattgtaattaagtcacctggaatggtttagtaaataattatataaaacattagggtacagaaacaggtcacagtctataaaaggaactttactgaggaatttactttctcctttaatgggttggtaggcatagttattggggttacagttctccctttttgaaagagagctatttttcaaccccaaattgcacgtttttcttttcatagttaagcacttctataccaaaacaaaaaaatctccattgaaagcccttaataatttccagcaagatacaaaagggcagagcatgggtctcaaagtatgtgtaagcatgacaagcagctgctaaacggagatgcctgaagagaactgaactgatttgctcaatctaaaaacaatgaatctctatatttcttgatgtaccttaacagtatgtactgataaataatactgtaaagtgtttctgaatgctcaatcaggacagcctgttaggaaggaccaagctaaaggatgcctccaggacttgcctgacatgttaccagcatactgatctgaagcaagttcagggcaaggcaatggcacttgaatttggggaactgccccaaaaatctccttgaagtacaccacctgcggtgttgcagggggaagagagacgacaacgtggacttgatatctgggtacatattgtaccctatcgcaaatcataattacaaggcaatggaattctttgtaggatgggagtgctgctcacacagactatagagactgacactccaggtttttattcctttggcgagtgatgactatggaaaaggtacatcatcttttgacagtacttgggagtagaaggcaaagtgggagaggaaaccattgatacaatgaatgaaacaaacaaatgaaacacacatcaagcaagtcttacacatggtgctcactagaaactgggattcagagttgtattaccacagaagtgctatcatcctcctcttttctaggatcaccaaatatatttactaaaaaagcaagtttgtgaggcattgtatcttttctacttgcttggcattagacaggaaagataaaagggttccagaccacatttaaagggaactccctctgaagaagttaacaaactatgtttgtggcaaccatggggttaagtagctttttcactcaactgaaccccatgggaaatatcgactattcagtttcccctcactgctatgcttgtgaaccagggtggctaaaggcaggcaggaatgagccaagcccactcaccaagggaagactacaagaccaattaaaagcattccctttcctctccacatccaaattgggatctaaaagctatgattagtcttgattacttaatattttaaagggagagggacaaaataaatgtaaatctataaatagttccacgtgtagctgattatctgcaaagaccttgccatcaacttactattgcttttgcattttgtggattcaattccaatcagaattgttatcctctcaaacttgcattgtgttgccttgcttggttcaagagacaggagaaacccaaaatactaaaatatcacttatgttatattagcctggaaacctccacacagggttaaacacatcaaaacttaaatatacttttccaatgttaatcttattataggtctgaaataaaaactgactatcataacattttaacactttagaaaattaactaacaaactgataaaacatgagatcagctatttctggatctgcactcctctaaaaggagaagcaaattagagaaactaaaaattgtaaaaactgtgaataatttgccaggataggagtaaccttaagggtttctcctctgaaagccccaaactacacagagaacttagcaaaagaagatgttgctagcaaggccggacataaggcagataaaccccctatcatacacagctagatgggagcttctccatactgaggcttttcaagtagtgctttttgaacagctgaagaaaagctgaagccatgttttccaaacagaaagaataatttagtatgtccaaaggggagctcaggactccctagcagataacacattatcttgtcaagtgttgtggttttttttttcctggtttcactattctaagttacataaaggtgcttttaattggaaaagaaactaaacatacggtacctgtttagcgtagggatgttccctctgtaattaaacaaccacagttagttactgataagttagtgaaagccataataaaagaattgtcagagcagatatagaccagtcatgaggagctccagtttggcagctctggcattcagcagacataattaagtgctcattacccttcaacccccaggatacctccaaagaggcatgctcctaacctacctcaccacaccagctgttgatggaaagggtcaaaatgtatttaccatggattttaaaaatagctctattaccaaaaaaaaaaaaaaaaaaaaaaaaaatttagagtagtggtaaaacacaggctgatgaaaattaatttaagctatatgatatggtatattaactcaagcttcaataagaaatataattcttcacaggattcttagagactcttctttcttgttcctattactgaaggtgtaataaggaggtccagggaagttgattccacagctcctcctactttaatcgcttatccaggatatgtgacagacctacaaattctccaccaaagaaaagtatccaggaatctgggttcccagctacctgttctaagtctttttaaccatactcttcctcccatgaaggagagcaggggggaaggtactgtattctaggagcttaaaagaactgaaaatcatgcaggaaagtaatgataaatgattctatgataagttgttaaaattaattaatactttgtaattaaatgagtttagggtcataatgattttaaaaattgctgttagcttaaaaactctaggcctctcataaataaaaccttatctaaatttgactaccacagaacttccttataaagaatgtgccaaatcatgaaagaaagaccacgataagaataggaaactacaaggcacatctcccacattctctttggcctttgccactaactccttttaaaagatttccccaactgaaaaataatcaaacaaataaaaacctttattttcaatgttaaatgggcaaagttatacttaccacctacaatttaggggcattgtaagggggctgatcggttgatatcttaaccttctaacattcttttatcagcatttaatcactgttggggttttctagcacacagaggacttaatgggcagaacatagtgggtggtgctgatgatatgtggaaaggaagatagagggaggaaaacgatgcactttccatggcagtagaaggagcagaatagactgagcaggccatataaataaaaagctgtgacatatcactgcacacaaactgtatacctcatgtgatttgtgagtagaaatgctctttgcatcaaacctgtatcacagagtgaattcataagacagcaagagcaacctctgagtgcagaaacctgaacctttgctgtttggattccttaagcctctcactcaggagagtgggttttatttttacaagagatccttagttataatgcacttgggcctcaacaatacagaaaaaataggcacaggttctagaacagagggaggtacagctgaacagaaaactaactgcagatgctaatgagaatagttttccttttacgatataaaggatgctaaagaaaggggccgcctgcacagtttcttagcatgaatctcagttcagagagaactctacaaccaaagaaacctcaggttccattcatccaggtttctagagtttagaaaccagtataatctctctcaactgttaacaaatttcctaatctaataaaataatctaactgcttctgtagctacattctaatccctttgggagtcttcacaggatgacggccatgttttcagtagaaaaaggcccgaactgaaaagaacaccaataacaacaaaaagccaggctttctccatcagcaactctcaagctcctatagagagccccctgctgctttgttataagaattatgcaccatctacacagtatgggtcaaaaagcaaaaactcccaacatctctaatttttaaaggaatggtcccaaatcaatcatgtaagtaggtttagagccagcttatccacttaggtagaataagaatctgtggggatgtaagggagataagcaaggaaggaaggaaggataaactgtctattaacagataaatatttggtcatgtccataatgatcatttacatgttttctttttttttttctttttctttttttaagaaatagagacaaggtcccactatgttgcccaggctagtcttgaactcctgagctcaagtgatcctcctatctcagcctcccaaagtgctaggattataggcatgagccagcaaacctggccactacaaatttttcatcctatacaagggctatatggtcaatttaagaatatgacaaatgtggcatatcgcacactactgtgatacaccagaaagctagattaacactctgtaccaaaaaaaaaaaaaagccacacacacaactaagggaagagattgtatacgagtcaaatattccatttatgtagctgaaaataaaatttgccacattccactgcatactcatcacgcaaaaatagtcaaattaggccgggcgcagtggctcatgcctataattccagcgctttgggagactgaggtgggtggatcacttgagcccaggagtttaagaccagcccaggcaacatctccaaaatccatctttacacacacacacacacacatacacacacacacgcacacaaatataaaagttagccaggtgtggtggcacacagtacacctgtaatcctagctactccgaaggttgaggtggaaggatcgcttgagccaggaggctgaggttgcagtgagccaagatcatgccactgtactccagcctgggtgacaaagtaagtctcaaaaaaaaaaaaaaaaaaaaagtaaaattgctcaatctttgataaggcaatcaagtatattttcaaatacataaatgggacataaattcacttcctatctgctgtttgggctattcaaaacacttattataatgaatcttcatttacaacatttgatgaatattagaaccactttctttctagtagattagctccattttacagatgtgataaccaaaaaaccaaagaggatgctttccaatgacattgttcaatatggtgtcataaaccacaatctagacttggcattttcttatctccgctctccaagttagcattccacatcagtatagattttagagaaagacaagagaaatcctgtgaattctgaggttcccggcactaagtcacctctgattttattgctctgcctgcccagaatggctggagagcttgcttcaatatgaatgcaaagtcagagttgccgctgctagctgaaccctctttaatttaaagaacactgacttctctggcagccacaagttctgtgagcctttttaccatcccttccagctgaatttcatttggcttgattctagctggccttatataaatcttttatcatataaaaatgctcctgattcttttgcttcctaacttgaagaagaaaaaaaaaagagcccatatgaaaatgatggggatgcatgcaaacaagcagtggttacatcaagctgtgactgaaagccagtatagggcaactcttttgaaatcaggcagcaaagcagaatcagaagaggtcggctgaataacctactagcagccactaacagcagtaccataggagaaagagcaatttgactggctgtgaccagtggtggtctctttgcatgactatatttctgcaggaaaatccaaatcaagaactgtaaaacacatctgaaccacgtatttctactggcatctcccccaccacctccttgcagttcagatgccctgagtctactgcagagctttagtttacaataaaatgatcattacttcattcatttgcagcccctccaaagccccttctttgctctgctggaaggttttgctctttctgaaacaagtacatcaacagagctacagcatattactgttgcctgctatataattagctacgaacccacagcacaaaactacggggatttacaggtgtcctggattctgcttttccttcccccaggactcagctagtcttccttgacaagaagggaccttgggctaccctaatgatatattgagagttttaaactcaactctccaatcttacaagtctagagtgccaaaataacacagcagagactagaagctgagccacggatacaggaaagcactttggtaagcacttaaacctgctgagaatcttctcttctgccagatacttgcatcttatcagcagactaccctgaatgaaggaagcaagcactgtaagatttcatttatttatagctcattctggcttgctaactacaacaagtgctcccactgcagaaacaatgctacaagttggatgacttctgagtatctcagtactatccaaagaaaggtctaatctctgggtgttaaagattatcagaattcttgagaatggcagttggctaccaattagtcacatggaaggctcctgatttctaaccttccttatgaataaaaagtccagaggccgcccactgacagctgaacattgaggatggatgccaagcagcctaaactcagccatgaccaaaacacatgctatcaggggaaaacacagccgacctcttctggaggtaagacttgagaaaagggaagtatttgaattaaaacattataacacagaaggccaaattcacaagtagcaaacagcagagaaggtacagtggaatccgacttaactaaagcatggatttccatctatgaaataggtggaaataaacaccaataggtcctcacccattatatatgtacagaaacgtacaacaaagtacacctccatctcctgcatcaaatgtgatgcttcttatttgaatcacagagtaaaggttaaaaagattactcatgttcactagcgtatattaattataaaaatcatttggagttttaaattgtgtactcccagactgtcatattatattatacagagtcatatgcataggcacaatttatgggataatatactttacatatgtttgtataaatataactatattttaaaagatcaaatactagttgactgaagaatttgtttccagattatcctgaggcacttaatatgcccaaagcttagtgaaatcctgaaggtcaaatgagtcaatgaattgtgcaaaatacagacattcaggatgatgcttcagtgtaacaagctttcccatcaccagcaccagtgagtgatacttaagtttctgaataggaaaaaagacagacatatacaaaacttgggctctaaaccctaagactcactagggaaagaaggagaaaaaggaatattcaatgatatagtttgaactccagggttaattcatgtaaaactcactaaagggctgggctcacagaatcttcaatgagagaattaggttctagaagtctgcacaataataaaatgctcccttagtatagactagttgccctgaatattcctgcaccatgaaaacaacttgagatagtcacttctccttcaagaacacaagtcagttaaaaaatgacacattaaaaaaaaaaaatcccctcccctcaaaaagaatcacacagcctttaatgctaagaaggtaaaaaaggaaacacacacacacacacacacacacacacacacaacatacacatgttacatatacatacacacacgtgtgtgtgtgtgtgtgtgtatatatatatatatatatgtttctaactatgcttaaatcagaaaaatctctttagctgctgttcaagtgaaggaaattttagaagtaaagggtaaatccagaccagaagcttgcctgagtgaagttctaataactggatcctctgctgaataagacctacagatgccaaataagttggaactacagtccccagaaaaaaaatttagaagtcttgggtagaagatcaaaaaggagataatatacctcgactgatgcacacctagcaagaaatgaaataggaagtcacacagattaggaataaactatttagtaatctgctttttaaaaaaattattggagtttttttttctaaaaatagtcgaattataccaaaaaacagagtaaccgcaacatgtcaaacaatgcaaagtcctatgatgaattaaaagaaaaacaaaaatgtaccaaatatgttactacaaagcaactgttcaagtgtgctaaaaacaggtgtcttctcccttttcagaggctcccctagtcatttgcaatatattttgcctacttctctaaaaatcaaaataggtcctaataagtaagatacaggtcttcaatcccaacagcaactaagggattttcctgaataaaaaaaaaaacaaaaacaaaaacaaaaaaaactctgctgccagtttgcagacagagtgccgtgtttcaccccaacctatggaggctaaatcacagtcaaaaacaaactgcgtgactgggaattatagtaagaggagttaaaaacaagggcaggtgcagtggctcacgctcgtaatcccagcactttgggaggccgaggcaggtagatcacctgagttagggtgttggagacagcctgaccaacacggagaaaccccgtctttactaaaaaatcaaaattagtggggtgtggtggtgtacgcctgtaatcccagctaatcgggaggctgaggcaggagaatcgcttgaacctggaaggcagaggttgtgttgagccaagatagcaccactgcactccagcctgggcaacaagagcaaactctatctcaaaaaaaaaaaaaaaaaaaaaaaaagctgcaggaatggaattccatacacaatgagattgcagtcttgctttgatattacagcttactaagacacttctaacgatgtgctggacaaattttgtctacttcaaaaacacctagctaggaatgtgaagaccaagtgcaaggaaagaaaacacaaaaaattggttaaacaaaatactgtggctcatgcctgtaatcccagcactttgggaggccgaggtggatggatcacaaggtaatgagatcgagaccatcctggctaacacggtgaaaccccgtctctattaaaaatacaaaaaattagccgggcatcatggcaggcacctgtagtcccagctactcgggaggctgaggcaggataatcgcttgaacccaggaggcagagcttgcagtgagcccagatcgcgccactgcactccagcctgggcgacagagtgagactccatctcaaaaaaaaaaaaaaaaaaaaaaaaaaaaaacaacctgttttctcccccaataatttttggtctgtactaggtatggtggcacatgcctgtagtcccagctacttgagaggctgaagcaggagaattatttgagaccagcctgggaacatgacaagaccccatctctatgggaggggaaaaaaaaattggtttgttaacctcaattgggaaaaatataaaattctgttttatattgataagtaaaatatgtatgattcatataccttttctttattctcactgatttttaaagcatgcataaaatattgtagtgtaacatctataatatcaactgtgaataattcctgtaactactaagaataagcaacataagaataataatttttcctctctccacgggcactaccagtaacaaaaaaaaaaaaaaaaaaaagagggctcagtgtgactgtcctaattaatttttggtctaagttgaactgtctaatatagcagccattagccacatgcagctagggtagtacttgaaatacggctagtttatattgagatatgctgtaagtatagaatacgtgctaaatttcaaagatacagtatgaataaaagaaaaaatattaacaattgttattacatattgaaatggtattttggatataatgggttaaataagatgttatttgaattaattttatctgtttctttttacttttaaatgtggccaatagaaaattttaaatagcatgtagcttgtattatatttctatttgacagtactggtttagaagtagtaactgtcaattatagctgttcatcagagttcagaggagcttttcaaagtggtcacctggactctaatccaaaatgaatcgggtcttgaaagtcaggactccaatatgtgtattttcaaattacccctcagataattttgagaatcattaatctagaggttagtggacataactgagccttacaggacagagtggaacaaatattggtagccctctgtaacttctttctgtagaatgagaaacaatatgcttttcgcctgcttgatcaaaacaataacatacaaaaaaagtactggagttagaaaaagaagaaaagtacttggctcaaaactagctaaatctaaaagagcttagatttctgtttaagatgagcaggcctattgtataataaagactttggccattgtctctggttcctggaagagagactaaatccttataatttcccaagtaataggagtgtcattgttattttaagtcccttggatcacacctgagtttatgctaagagatgagatgactcaggaggggagctggtcactagaaagaccaactgtgtgattagaaggttgagggctttcagccagccagacctctgggaggggagattgagtttaatcacgtaggctatgatttaatcaagcatgcctacgtaatgaagccctgattttaaaatactctggacactgaaggtcaatggagcttcttggttggtgaacacatggatgtgctgagagggttgataaactctgattccacagggaacaaactgggaagctctgtgtttgagaccatcccacacttcaccctaagcgtctcgtgcttttggctgatcctgacaataaaactgtagtgcttgaactctgtgagttgttctgagggaattatcaaactgagaaaattgaggggaccctcaaatttgtagccagttggtcagaagtgcaagtggccaggggaccccacttatggccccatctgaagtagggacaatttggtggtggactgagcccttagcctgtggcatctgatctaacttcagatggctagtgtcagaattcaattgcagtacaccagctggtgtcataataaggttataaatccaaattttaacaaaaacatttgggggaaaaatatattttatatatataaaaaacatatttttcatatatattatatatataaaaaacacatttttcatatattataatatattatgtatataatcttataaaactaaattcaagtagtaaatctgcaataactgaacaagctatactctgaaactgaatacatcattttatgatcaaacctgatcatttgatcctaaacagaactttagatcaaaaaaaaaattaaagaaattttaacatttttctggttttcacaaagatgattttatttttcctttttattttgcaattatcttcaccttcacagttataccaataataatgatgacaataacaataataatccagcaggtttagaattacactgacaaccaagggagacttcagggagattacaggattactgttatgttcaagtctgatctttatctacaggcatgtccagatgttgggagggactggcatataagttttgtaaccacattgaactaaccaagattcatactcttgacatagaaaggtgaataagatttcttaacaaagcagtcaagaagaatttctctcatttttcagccaacattccctcaccaaactggacatatcctcaaataaaaaaaagtaggacagggagaacaattaagagagacaaggagagtgatgaggagggaaggaaatcagaagcagccctgcagcctgactacaaatcactgcccaaagggaagcaggaaaaagcaggaagaaaaggagaactgccctgagaattacaaagagcattaagtatagcgtgtagttctctacaattattcaaggaatgcaggaaaagaaagaagactgagtgctgtgcctatgtgtgccatgagtacttcgccgctcactgaaggacaaccattcgtttctagaaaatgagattctgaaatccatggaggcaaaaatgtaccgagagatgcttgctaaatcaaggatatatgcttttctctgccagccataaggtatttttgaggtagagaagtgaaaggatattctgagacaaagaagagaggtactttttctgaagatgcctctgctcatctgccgacctctgctggatcaacagtggcatccagtggccaaaagtctcagcacagacttctttgtctccagaaagggtttctattgctttgggtgaagtggcaatttagaacaaaaccatttctggtgtctataactaaggttcccaaaagacacagtactttgtaataccaagtgaagaaccaaaggccataaagaagaaatggagaggggcaggttaagattggctgtggtatttatatttcctgtggtattactaaaaagaatgaaagtacaggaggggatgaacctatgtgtgggtggaattcctagattttcattgccttagaatactttttaaaagatagtctataagataaagtattttcattttaaaacaaaagcaattctgaaacaaaaacgtccatatgtacattttattttttaaaagacaggaagggacaaataatgtaattatcatggcttaattcagtaatttatttgagattaagaagtttggttctgcaatgtaatttttaaaaactgattgaatttcaactgctaaattcaggtggtctgttttagggagataatgaaactggctcagatataacctcaacccatagcaaacatatagaaaagaaaagcattccacccaaagtatttttttggtctaattgctgatttaaattgttaaaaagagtgatttttctggcaaagttctagcaagtaaaatgctagtaaattctttctaattttttaaaaaagaaactatttcctcagtgacataatacaagcaagaatgaatggagtaatcctaaactttcatcttacttagaccataatttttctctttagatcaaagaagtgggcaccaaaaggctcttctcttttggttcatattgttcattttttgccctacatttctaactaaaaaaacatggaattgtcatacacattactccccttgattctcatggtatacctctggctggctcgggtgcacataccacctcaaactcacctgtttggatgagatgtgggcagcatgaactggaattccaccacacaggtgttgtccttaagctggcggtgttgtacgctgttaagttcataggcaatataagcccttcgaacatacacctggttcaaaagaaaccctcagtaaataaatttcaaaaacagaaattaagaaaatagcccagaaaaagagtcttgaaacgaggtatctgaggcagaaggtgctctgtggggagagaagtcccaaggccctatgtatacgtacatatattgctttaattaataaagctggagtcttaatactataaccatgactactaatgaaaacaaaactaggctgcctctgctggacacctatgtgcactgtaaaccttcttccacactaacctaaaccctggagaaggtttaatctttagcaaaagacagcatatagaactacaactattaatctattaagcatgatcatttcaacagaagattaagcagtgagaaaaatgagaggtgctgattttgagccacttacagagtgaaaatagaagacacaagcaatcacagtacagttcaactcttttactatctcatgtctttgtcttgcgtcctccccgacttccccacccgctcaaaatcagttttcagcaaactctgatcaaaagcagtaaggcataagcagtaagacataatttgacatataatatctcaaatacttgaacttgactcaagagttaaaggaacagcaatgaaataaaataaaaataaatataaattaaaaaaagaaacagcaataggctacatctctgcaaaaactgtcagtccaacctcacacatttcacagcaaatttgccatgcacataaaatgctacctgagattctatggcacgggaagtatataaggaagcttctcattaaatgacataaaaacactacaaaacacttaaatgttttaaaacttttggcatttactgagtaggataatttacactctaccacagagtacaaataaaaagtaacacaaaagagctggcaacagactaccgtgatgttacattacataaaatcatctaaaacactctttttccccatcttcaaaaaacaactatttggcaactttacagtggtattcagggcctgcaatttttgtgcttaatgaggtagtgtgctgtagcggaaacagaagtctttggagtcagattagcctgagttcaaatgcaaactcttccacttattatctatgtgattttggacaaatcacttaacctctcagagtctcactttcttcttacttcctaaagtaactgtaggattaaatgagaaagataaaatacctaaaacacagttcattaaatgctattactttctttcctttgaggaagtatttcataagagctgcttgacaatccaaacataactaaaatcaattttaatttggcccaaatcacacaatggtaagatgacacatgctctgatcagccatatattttcgctttttgtgttacaaggaatcctaattcattatgaaatgggagaattcaaatacctggaaaatagaaactactgaaaaatgctggcagctattttcctgtgattggaacctagaagctggtgatgagttcagatgaaacacttgagtaaagtatctgagtaagcacatactgtttcagaggaaaagagactaactacccttaagaaccaaccttaaggccagagaactagaactgacatggcagccaaatagacagaagaaaccagctagaaacaaaggaaaaggtcatgtcccattaccataaatacttacctccagagctgccatcctcactacttggttgctgtgatagaagaagtttggtaggacatcaaaaatagatgtttctgataggatgagtttctagaagatacaaagacaggcttaagccttacatcaaaaggagaacaatttcaatggacactatttggcatttgaagcatttagtgaaacctaagaattttgtctctgaatgccataatctctctgtgcctcagcttcctgagctacaaaatggagaaaataaaatacctatcctcatagggctgttgtattatatgagtaaatacatgtaaaattcttggaatactgaattaacaatgcattatttgtatgctaatataagtgtttatgactgttattcttttctgacatttatctgaactctctaaatattgtcttcaccaggcatggtggctcacacctataatcccagcactttaggaggccaaggcgggcagatcacttgaggtcaggagttcgagaccagcctggccaacatggcgaaaccctgtctctgttaaaaatacaaaaattagccaggcgtggtagtgagtgcctgtaatcccagctactctggaggccaaggcacaagaatcgcttgaactcaggaggtggaggttgcagtgagccgagattatgccactgcactccagcctgggcaacagagtgagactctgtctcagaaaaattaaataaaataaatattgtctcaatactccactatggtaaaccctagatttgaactccagttgaaaccctagatttcagctattaaccaaataagaaaaaacatccttttttcccctctagattccccaggaagaaatgttacagaaagtctaaagattcccctgggccagatataacaatggtatccttgtttccaggtagaaaaatataaagtcattcctgagaagataacatttaaaaaataattgcggtggtccttctgattagtagtaaaattagacaataatctcttaaaaacgggcttcttataaagcttaataataagcattaacataaaattaaaattaaatgatacttaaatagctttgtctccagaagagtaacaactacctatgtatacatctgattcaaatatcataaatcatcagagaaatgtgtgtgtgtatatatatatatatatcagaaatcaaccagccttgtcatttaattctggcctagaatactttctaggtaaagtacaaagataaagacttcaataggacacttctatcaaggcaggcctatttgatttttaagctaaaccacaattctaacagcatttgtatgaaaaaaatattcataagtataaatcattttagaaagtcaagatatgaaactccattatatggaaaatcaaaattaattaattaagtgactaattacttaaactatgcttgagaataaaggaggtaagagtccagataggcaggaaagggttatatatatatatatatatatatacctgcaggttctcaatgcaaaattgatgtccatacatgtcaatagctgataggaagatagactctacttggttatggcgaagctcatatgatggcaaatgggaggcaataagaacctagagtgagaacaaaataggaggcacacattcctcggagtgattattctagactcctattaggcagctctgatacaaaagcaataaatataaatctgtaagtgcaggcatcacagataaaacagagaccaagtaaaacaacttctaggtcctgtaacataaagccagtgccaccaaatactgaatctcagttgactctcaccatgatttgcattgtggccaatttcccatggtgggtagggggaagggagagaaaacagcttcgatcaagttccatcagtgtatgtgatttaccattgcaaagctgctggtcctagggactgcatgactagctgttaattgggaatcaggtctggcagggagcagctgtgggaaaggtagatgcagcagagctagccttttacaactctgaagtagaaagaaagactagggaaagctgctttgacagccccaggtactcggcaccaaggagaacgcgtcaggaagtaacaccagtgtgtgtgaggggcagagagagtgaaagcagtgtcacaaacaaacaaacagtgacacggtaggatctgaataccctcagcaggtcactgagaggttcaatagctttgagtagttcagtgacatggatacaattgtagagaaagcagaaggtcactgaacagcttcaaatgctgcttccttgtcaatgcccatgcactgaaacacaaagggagtgccaactcttggcttccctgctgaaaccttttggaatggaaatgaagactgcagggtgaaactaactggacttctctggggttgttctgattgctgccgcctaagattcatttcattatctttctgctttccacacttgattatttcctgtacacttggaagttttcatctgcttctaagctccctttgggaagtaagaaatactgagtctattttcttccctgagtgtcctttcctccacctgaccctggtttactatcacagggctactagggagggaagggaatgataccaggattttttaatggggaaagggcttctattttaaagagacgcagcactaatcttttcctttctctttaaaaaaacataccacatgaaaacatttgttctgaggaaaacgtgacacatatatagaaaataacatgttctttgtaaagtgattaagcaaaagttcattgtgtctaggactgcctgatctatgaaagccatccctcctttaagaaaaccaacaaatgtccttacctggcgtgctcgaagtgctactttggcattggtggtcttactgagttgagttagctctgtgagaatattcagcagctcatcagtgagagtagggtcccggccacacaactgatcctaattgttaatgtaaaaaagaacatagatagtcatattaaaaagaacaggtggataggattttaaaatagagaaaaggaatgaaaacaaagtaaacccagctggattaataagaaaatgcaaacttcctattatttttaccctaaacaatgtggtaaagaagatcccagaggaagtttggctaaggagaggcagcccaaatccctcattcaaaattcctaatgtatttccttataaatcaacactatacttttaacacgcagaaggaatcattagagaccactaaaaggggccaaggggattctgagtaagaaataatagatatgtctcaaagttttaagagaaagttttaaataacagggactaaaggccttcctgtttcccctcccacttttggaaagaaggtagatataaggcaaaaagaaccaccccagtggttttcatctcataaaccaaattttcagcaacccaggaggatgcaaaacagaaacacaagaataaattatttatttataaacacacactaactaaaacaccatctcatatgctggcaattctgcatcccaaatcatttctcttcttcctgtaccaagaatcattccatgatacttaaacatgtgaatccttagctgaattagaggaaaaaaacaggctcctactatagaatccatggtttattcagtattgggtccttcctcttctaagaagtaaaaaatgttaagaaaataatctcaatcatattctgagagaaatatccttactggagtccagtggaatatcagtttattccctaaattcatccattatccatgcaatttccatctaagctgaaaaaaatgtaaatgcagtttttataaatgtctgtcctttttgaactttacagacctactggtagtagtaattattaacaccacaccatataaaatatatccatttagatatcactacctctacttggagttttaaataattgccttggctgggcagggtggctcacacctgtaaccccagcattttgggaggtcaagacaggaggactgcttgagcccaggagttcaagaccagcctaggcaacatggtgagaccccatctctaaaaataaaaaataaaaataaataaaacaaaaaatttttaggccgggcgctgtggctcacgcctgtaatctcagcactttgggaggccgaggcgtgcggatcacgaggtcgagaccatcctggctaacacggtgaaaccccgtctctactaaaaatacaaaaaattagccgggcgtggtggcgggcgcctgtagtcccagctactcaggaggctgaggcaggagaatggcgtgaacccgggaggtggaccttgcagtgagccgagatcgtgccactgcactccagcctgggcaacagagcgagactctgtctcaaaaaaaaaaaaaaaaaaattttttttaaagaattgcctttgtattttaataaatatttattctccccctactaccaatgggacatgaaagaagacccaaagggcctgcttgttgctgcatgttaatctccccactttgattatcagcccttttcttgaagaatttctatttcatacttaaccttccccatctcagggatactctttatagacctttatcacagaagtataaataaatgcagtataaataaaagacatgctttttccaaaacccctaccttccacatcacaaggtaaatacttttgaaatactcaatgccattatgctgggaaggtttctcaaacccttttttttttttttttttttttttgagaaaatgatataatgagattctggttccctaatccaccaatcagaggtctgctctgactgtccagagtcataaaacatatgatgggagttataattaaggaagtgcaagtactgttttcacccatttcacccagataattcactcatctgagtgagaaaaataaaagctgctattaaagtgaagataaacccagaggttctattgaacaggtagcacagattagagaatctgttctacctatcctaggcataaaagcaaacaggagaaaggaaatgcaagtaagtctcaccttttgctgagaactaatgagcaaaacagaatttcaaaggaatatgtaaaactaccagaaacaggaccatagaaagacagaaggaaagaattgacagataacagtaggtagggaaaccaacataattttttcctacctaagtccctttcctaatgttcttaatagagcaaacatactcctttccgaagtacttactaaaagcattggaatgacccaccaaaatgcctaaaaacataagaagtctactgggtaatgccacaactcgactcctctgtacaaagccagactaaagtctcaacattaaaaacaaaagccaacatgacaaaataagagcactagggccaggcgcggtggctcacgcctgtaatcccagcactttgggaggccgaggagggcggatcacgaggtcaggagatcgagaccatcctggagaacacggttgaaacccgtctctactaaaaatacaaaaaaattagccgggcgtggtggcgggtgcctgtagtcccaactactcgggaggctgaggcaggagaatggtgtgaacccgggaggcagagcttgcagtgagccgagatccggccactgcactccagcctgggcaacagagcgagactccgtctcaaaaaaaaaaaaaaagcacactaatcacctccgcaacctgtatcagatttgatatagaatgcattccctttaaaagaaatataggtttacctttacagatgaaactaaaatttttaaaaatggagttatcctcttgcatagttacagatcatgttttgttctgttttgttttgtttttaagacggagtctctctctgttccgcaggctggagtgcagtggcgcaatcttggctcactgcaagctccgcctccggggttcacgccattctcctgcctcagcctcccgagtacctgggactacaggcgcccgccaccatgcccggctaattttttgtatttttagtagagatggggtttcaccgtgttaaccaggatggtatcgatctcctgaccttgtgatccacccgcctcggcctcccaaagtgctgggattacaggtgtgagccactgcgcctggcagttacagatcatgctctaacttaaaagacaaaacaaagcaaaacacgtaaaagcacttttttttaaaaaccacttttttattttatctttccactatgagagaaaggcagtaaaaaagggcttcaggaaaaaacaacagtatgtgtaagaaaagcgaactatggagattagaaaaaataaatgtgggccaggcgtggtggctcacgcctgtaatcccagcactttgggaggccgaggtgggcggattacctgaggtcagttcgagaccagcctgaccaacatgatgaaaccccatctctactaaatacaaaaaaattagctgggcgtggtggcgcatgcctgtaatcccagctacttgggaggctgaggccagagaattgcccaggaggtggaggttgcagtgagctgagattgcgtcattgcactacagcctgggcaacaagagtgaaattccgtctcaaaataaaataaaataaaataaaattaaaataaataaataaggccgggtgcggtggctcacacctgtaatcccagcattttgggaggccaaggtaggtggatcacctgaggtcaggcgttcgagaccagcctgaccaacatggagaaaccccgtctctactaaaaatacaaaattaactgggtgcagtggtgcatgcctgttatcccagctactcaggaggctgaggcaggagaatcgcttgaacccaggaggcagaggttgtggtgagccaagatcgcgccgttgcactccagcctgggcaataagagcgaaactccatctcaaaaaataaataaataaataaataaataaataaataaataaataaataaatgtgaagtaattatcaaacagtatgaattaaccactattttcgttagtctattctgacttggaagttttccattcaaatattttctccactgtcatcattaatacttagaaaaaaattggcaacagaaaattatgtatagaataacttcctcaaccctgtcttgtccctgacctagacacagcattcaggttctgcaagaaaacatcagggtttttcagaaccacccatcttaagatgccaactaacatccaacaggaagtttattaccctctgtcctagagacaggcttcttttgggcaactggacaaacaaacatcaccatctaatcctggtgaacattttgtaaggatacctttagatggtgtctaggtcagcagatgtgtttagtcaacataaaaaggtttgtttaaagagccaacctgctgattttgggattacaggtcacttgcaaaaatctggcatcccaatccaccaaccaaaggtctgttccaactgtccagagtcataaaacgaagtgaaaattattattcagccatactggtacaaaacagttatttcttgcttttacttttgacctagatggtagctaactataggaaatagttcgaatttgcagaaatacaacaaacatgataaaacgttaaacccatagccaaggctgggcacagtggctcatgcctgtagtcccagcattttgggaggccaagatgggaggccgagaccgtttgagcacagaagtttgacagcagcccaggcaacacagtgagaccacatctttaatttaaaaaaaaaaaaaaaaagcatagccaaagttacacagttgactgacagaagaaaccaacatagtccaacttgatcttagaaggcaattcaaaacgaaaagaatgtgaccttatgtgtaatgccctcaagacattaactattatttagccgggtaggcactaaacccaggatcagcaatgaactggtagcttcttctagtcatatctgcactttttgatatcccaaaaaatgtcatagggtaagtttaacaattgttaatatcacccttattcagtgaatgtggaatcactgagaaagacttttcttctttatttacatattggacaaaattatttgcagtcaggttaagtggaggaaggaaaggtgctgatcagcatcataaattctccccatctaaaccaaatcaggggttcataggcatggcattactcatacagaagcatggtttatagcatgttcatgtggaccgtatcaaaaataagttacaagtagtgaggggaagactacttaccatcaaggtggctagaagatatgtacattgccatctagacagctatgaagatgttgatactttgtatttgtaccaattagcttaatctggctaaagattaaagagttccttaaatatctctaagcaaacataaacaatgttctgagttctaagctttttcctataaagttaaatttaagaaataagaagagctttcaaaaaataaatgtactattggtcttccagactttgtgttaaattgtgttacaatgtccctttaaatggaggaaacctgataggactttagccttttacctgatactttgctttccagacagagtgaaagattaccagaaatctgcttgagagtccatgaggcaagttaccactgggcaggttatgctaacacctggagaggatgaaggtacctctttactagagcaacgcatatcccatgacattgactcacggaagcctgagtttcttgatacctccctccctgtaggttcaaaagccccagaaatcatcatctagctcagcaaagcatactatcaacattcctacttctagaaagcagagaatggaatactgggcacataaccatcaatcaggaagccaagatatgcaaagaaaggggaaccagcagagaacacaagctgggggagtcaaagtgctaccatgtgcaggtgacatctgtaaaagatactaagatccgaggaaagaataatccaaacaaccaaaatggctcttaccagctactaccattaatgcagatgtgggagaggaggagggagaggaagaaggaagggggaacagctaagcgttgtcaaagaggaaaagaggaagacatgtctggcattcagtaacatcagatcagaaaagagcaccgtcttgagcttttacccatgttccataagtcactgctagctggccctgagcttgatcatatcattaacttcttgatttccaaatctctaagatgaaatgaaaacaactgatatttgaaaagaaattaatgacatgaaagcttagagatcctcttacgtttactgggtctcattttgtttttgttttttttttaaagaaaaatgtaatgacaccaaaataaagaaagggacaaatctggcttcctggttcacatgttcaaccgtccttatcctcctcctcctcctcctcctcttcccatcccccttgtcctcctcctcctccatcctattcacccaaactcaaactctgaaacagctcttttccctaaagagctcagcctgttggaaagaaagtctgggtactatccatgcaggtaagaagtaatcaggatgacaaggtgggagaaaaaaagaacagcgtggaaagtcagagtcccattggcttctgcctgtcctgactggcaaaagcagaaagcaaagcctcaaaccagttctctgacagggcccaacgcctctgcagcaccccccgcgtaattacacacttgagtgactggactctgaagaaaattgaaggcctgagctccgaacagctgccattttctctctccatcacaccagcgtgattacttgagaaatgaacagccctggctcaaagctactccagaattctcagaggaaatatggctccgtgttccaataatgagattcttaaggcaagcgttacttacaatcactccgcaaaaggagcgagctgagcccctatatcttacaaattagaatttaagaaacccagcgacagtcttggacaatcattactcttccgctgctccaaggattctaggctttggtctatttttagtgcagaaaactgttaagttcttaaaaacgtaatcacaataaaaagaaaaactcaccataattagcttcctataaaggcaaattccaccccattctaggtccaaactgacagattctcctaccctcctcatcattacccttttctgacagaaagtcttggctttatccaaatgagatttaacaatcctttcattaaattaaaaaaaacatctaaatagtctttcttccttcttttgactgacaaaaaaaattagcaagctgccatagattgtatcatttcttagctgaaacctgtcacttgggggaagttgaagtattacattgtactaacatatatatttttccctctcaactgcatctttctcgtttccctaccatctagctattctagggtagcaaaggcaatgaactctccctataattacatattttttaaagtggctattctaaaaaatgtgatacgctttagagttaaccagctaggcatataactgaatgagtggcactcttgttaatcagaggtgtatggtagatagtttcccttcattctgaagaaataaaaaatagcatgaagatgtatgtttttttcctccatgaaaaaatgatgtaattaacttaccaagaatcccaattccacaaagagacaaaaagaaaactctaggagtgaaaaggcactacagtccccaaaaagacaggcatgcagcagcaaggcaaatgctcaggaccatggggtgagggactctaggagtagtcctactgtactaattcctacaactaactcaaccagaatgagctaggagtgaaggacttgcaagtcatctttaaaaatccttcagcccacaaaaattccacccactggctgaatgcacattagctctcatcaaacttaccaggctcactccctattcctacttcctactaattcttattttactaagttatagggaaaaaaatcatacatttactaccaatacaataatccgagcttagattttcaatataaataaaaagggaccaatgaagatgcagaatacatttaaatttctctggtcagagagggggagtgctggatttctatttattttttttcaagtttgacatgagagccattgcttgtatctatggaacaagagttaaaattagaatatattggctaaataagatgaaattttaaagctgctgtcatgatgaccacaggaatggtgaagcacgaggcatttctaaacagagttaggaggtataagttcctgtgaatgagtatatgcataatggccagaagagtcattttctcactaaagcaggttccttcagaccaaggacaaaggtagatgtgagaaactgttaatccacagctcaagccccattcatcccataattataaaaggcagtagttttttttctctggccatagccatcaaaaggaaaaaaatactttttgcatatcattgacggtctttacaagttctgaaaaatggtactcacaataagcattgtgaccagaagattcttcttggtgacttgagcgtgagagaagatgtagttcagtacagtgttcatgtcacttttattctcttctcggagggcgaatacacatttgtcatagtgacctgcacaccatgaaaagaactggttctcacccatgtataaatgttcacatttacatgctatttgttttgtactgtctataatttatgagacgagcagtgagaagaaacatcataaggattttcttggatggatttgtacagaaactggcaatgtgatttagtaaaaggaacactggactaggagtcaggcaatttggatataagatctgggttcaaggcctagttctattagcaatttactgtgtgctcctgggaaaatcattttacctctctgggcctcaatttcattaaattttttaaaaattggggaggtgggtgtaccttaaagactgaaagattgggaataactcaaaccccagtcttactctaaactctctcatgatttctttagacgagaaatttctgtttaaaaagaaatgtaaatatcattaaacttgatgatctttaaggtctcccccagagcttgagattctgattccatgtttgacttgcagaaaatagttgaccctaatcagtaggaacagttttagctcaaaaaataaaaccacaccaaacttagcaatatccatgagaagtgtgactgctacccctggaatcaacattttcttctgttagtccttgaaacagctaagcaatgcctaggaacgccaaatccaacccaaggtatagatcaaggagaaccttgcattaagtcaaaaggtctgtagggagactaaagttatgcatattttcacttgccttccctaaggccaccaggggcaggttagttctgagtaggaaagctatgttttacaacagaagcataagcctctggtacactgtagtgatatctgccatgggatataagtaatattcagttctttagaaaacagcttacctcagaattaaatttccaagtaaagaggaattagtgtttgaatattctcaagggtcagaattttatgaaatcatgaaaacagtaaaggattatcacctcagttcagattccacgttaagttacaaaccagaacagtgacgttcaaactgcattatcatggtttcctagaacactgagtacactggaccagtgtaaccaggcttttaattattctaaatattagagattgacataagcaatttttttccaaataaaattatatttgaaaaacaatggactacaatatcgagagagctgccaatttcataaaagacacatttagaccaaaagggaagctgtttaaaaattagctgttctgcattaatatttttctctaccaagacttagctttgaagtgacaacacaaataaactttggcaataggaccaggggaaataaaaagaacacatttacccggggtgaggggagacattaacagaaagaaagcaatgatactttcttgttttttttttttttactttgaagatcctgcataccaagacactcttttttaaaaacacttaattggctgggtgcggtggctcacccttgtaatcccagcactttgggcagccaaggcgggtggatcacttgaggtcagacatttgagaccaggctggccaacagggtgaaaccccatctctactaaaaatacaaaaattagccaggcatggtggtacacacctataatcccagctacacagcaggctgaggcagaagaattgcttgaacccaggaggcagaagttgcagtgagcagagattgcaccactgcactccagcttgggtgtcagagtgagacttcatctcaacaaaaaaagaacacacaccaaacaaaaaacaaaacaaaacagtttaattatgaaatatatatacagaagaatatatagaatatatggtatcagttgaaataaacacccatgtgttattttaaagccattacattttaatagaacatctctagtatctttgaagacccctgcgtacccctcctcagaaacaactactaagctgaattttatgttaattattcttttgtttttcttaacttttatcaccaatgtatgtatagcttaattttcctggtttttgaacctgaaaaaaatggaatcactgtaccatttcttttccttaacattgtatttttgagattcatccttttgttcagtgtatgccttggtgcatccattttcactgctgcatagtaatccatggtaggaatataccagacttcaatgatccactctacctatgtatatttagattgtttcttgtcttttttaagattatgaacagtgctgtcacaaatactcctgtatatgtatcctagtaaacatgtgtaatagtttctctaaagtatattttctaggagtaaaattactaggttaaagaatacaaataagttcaactttattaggtactgaccaactgttaccaaagtggtatataccaatttgtacttccatgtacagaagcaatgaagatgatgatgtgacttttaaatttttgccactctcattgtggttttggtttatatgcctctaattacaaatgggattgagcatctttgtgtaagtttataaattatttgtacttcttcttctgtaaaatatctttctatatcttttgcccatttctctattaggatgtctttaacttgatgattcataccaattctctagatacttctaattattttttaggtatatattttgtaaatatcttctcacactttgtagcttatattttcagtctctttttttggagactgtgtcctgctctgtcaacggggctggagtgcagtgatgcaatcacagctcactacagcctcgacctccccaggctcaggcaatcctccaacctgagcctcccaagaagctaggactacaggcacataacactacacctggctaatttttgtatttttttagagacggggtcttgctatgttgcccaggctggtctcgaactcctgggctcaagcaatctgccggccttggcctccgaaagtgctaggattacaggcttttcagactccttatgacgtattttgatgaacagaagttcttgagtggagtttaagtaatcaatcttttcttttgtagtttgtacttgctgtgtcttatacaacaaaatcttcctatcctgaggttataacgatattctcctaaccatttaacagcttcacctctttagtacatatttaagtctttatcgggaattgatttttgtgtataggcataagatagggattccatttctttctttcctctttttttttttttaaatgaataacccattgtgctggtatcatttattgaaaaaaaaaaaatctatcctttccccatgatctacaatgcctcctctatcataaaataagttttcatatatggctggatctgtttctgggtcattaagttccactgatctataaatctatctctacacctatctcacaatttcttaattaatatggctttatattaaatcttgatatctgattaggcaaatcttttcaccttgtatttctttggaagtatcttggttattgtgagacttgtcttttatggaaattttataattagcattacaaatacactaacagaatttttattgaaatgtcaatctacagatgaatttaggaagaatcggcacctaatagtgtacattccaatttaagaccttgataatttatttaaatcttctttactattataatattcttgattataattttcctcaaaagaggcttgcacattttttgttagatttactccttagtatttcatgttttgggttgctattttatcaactaattaattaattatttagagacagggtcttgctctgttgcctgggctgagtgcagtggtacaatcatagctcactgcacccttgaatccctgggctcaggcaatcctcttgtttcagcctcttgagtaggtaggactataggcatgtgccatcatgcctggctaattgtttttaattttttgtagagatggggtctcactatattgccaaggctggtctcaaactcctggcctcaagcaatcctcctgtcctggcctcccaaagtgctaagatgacaagcatgagccactacatctagcctgctattttaattttttttttcctgaactgcttttctaaacaattgctctactgtaaacaaatactgttgaattttgtatgttgacttttgtatttagcaatcatgttagattttaaataatttaataatcaatctgtgaatcctttgaggctttctaaagagacaccctatcatatttaataatggcagatatattgctttattactttctagctcttataccctttaattcttttccttgtcttactgcactggctaggacatccactataaagctgaatagaagtagtgacagcaggcatccttgtcttattcctaatcttaaagataatgttttcaacgttttaccataatgcatgatgtatcctgcagatttttttgtgggtcccttttacaagattttaaaagttccatttcactcctagtttccaagagtttgtcatgaatggatgttaaattctgtcaaatgctccctctccacaccctgttatcttgagataatgagcatgtttttcctcctttcatctatttcatgataaattatattaattgactttctccaaactgatcaaccttgaatgcgtgggataaagccaacttggttgttatgtattattttgtatgttattggatgcggtttgctgatatctacatgaggatttttgctggtcatgagtggcataggctgcttttaaaggaagtgaaaaggagcagataaaggaaaatgtttcaaatttcagataatgtttcaaattctgtgatgtttcactgccatcttgtggcaggaagcaatgtcagcagtaaacagctttaaaattttagccaaggttatttcacacttaagagacaatttatcatttagtgaagctcttcagagaaagccagggataaagtctacctaaatgatatactaaaaagtattggaaaacctgaacttgctcttcctagatgcctctggttcaattcatggattagctgccaagaatcaagctcttcagatatgggtttctcaatttcagcctgtgatgactcaaccaacttacactacacaaggtcaaaaagatatcaacaggaatggtaatctctattagaaaaattacttcagccctttctcagaagcacactggattcctaatttcatcaagctgtgtttcgttgttctttctttagagctagtggatatagaggtttagtttttaagggagtagtgataggagactgtttattaatgggaagtgttgttgacaggagggggcttagctcttacacagtcctatagggatagtttgggttggttatcagaatcaaggctttcttagctagagagtcctcaggaagaggcttaccattctggaattgtgtctctactcgcaggtactgccggagcagatccatcaccacagccttcatgtggcctcggatgccacttcggtacctaggcaaatagaaagtctccactgaaaaacctgacaatccaacactattaagcaataaacccaaaggccaaatttacctccacgacattccactgaactgctttccctctgaataaagaacagcctaaaatgaactacaaaattaacttaaattctaagcctaaaagaaatctcactatagacaagaccttttttaataaagaagacaacaaaatcctgcatagccccacctaccaacaccttgattcagttcctactgctaagtagaaattattaccatactcttgaaatggctgagatatctgaaaaatttataagtatcttaaagttaaaagtgttctgtgaggccggttgccttagctcacatctgcaatcccagaactttgggaggccaaggcaggaggatcacttgagtctaggagctccagaccagcctaggcaatatggcaaaacctcttatctacaaaaaatacaaaaaaattagccaagcatggtagcatgtgactgtagtcccagctactcaagaggctgaggtgggaggattgcttgagcctgggaggcagaggttgcagtgagctgagattgtgctactgtactacaacctggatgacagtgtgagaccctgtctccaaaaaaaataaataaataaataaataaataaatatgctctgtgaatatccctttagtattaatagcaacaaccacaattacttttgcaccaacctaatataataggctccataagctaagaagaaaaaatgtcatactgggccctgtgacagaagaaaaattaggagcttcatcaaaatggcaaggaaaaagaaaacaacaaaatttctgtgccttattaattgacaggctggacgcagtggctcatgcctgtaatcccaacagtttgggaggccgaggcgggtgggtcatttgagcccaagagtttgagatgagcctgggcaacatggcaaaaccccagctcttctaaaaatacaaaaattagctggatgtggtggtgcacagctatagtcccagctattcagaggggttgaaacaggaggatcacctgagcctcaggaggttgaggctgcaatgagccatgattgagccactgcactccagtcggggcaacagagtgagatcctgtctcaaaaaataataataataataaataattgacagaaaaaaatgtagaatattaagaagtcagaaatattgagcatgagagttagctcacaattctaagatatttagaaaagacaaggtactttctaagatataagatgctttccaatttcttgaagtcaaatctgaggtaaatttttttgtgaccacttgaaagaaaggaagacatgagtatggacaggtctgggaatctggagttacaagttactacctctgtaccagctgaacaatgctctgagtattcataaagaagacttcccgttcagatttccggttcaatgtagctgcatggctatctaggatgtttgcaatctaaggtataaaaaagggaaaaaaatgaggcccaacccaacaaaatgccccaaagcatcagcctctatagcacgaccagtaggaatcttcttcttataacatggcagttcctatctcacatgttggcagcagctggaagttaccaggcgtagtctatatagagaatcacgctacataagcaagcagatttcatcccttgtcaccctttcccagatgaattaatgactacattacaaaaactatcatcttaccaatatctgttcaaggtcaagatccaaacatcactccccacttatctacctatattccctacacatacatctgctttatgggtaaagagtaaagatgctgccaaggtagtaagaatgtctctgaaaataaaactaccaataggccatgtgtggtggctcacacctgtaacctcagcactttgggaggccaaggagggaggatagcttgagcccatgagttcaataccaacctgggcaacataacgagacccccatctctataaaaattttttaaaaattagctgggcatagtggtgcacatctgtagtcccagctacctgggagactgaggtgggatgagccattgggcctatggggtcaaggctacagcgagccatgaccgcaccactgcactccagccttggcgacagagcaagaccctgtctcaaaaataaataaataaataaataaacagctgggcacggtggctcacgcctgtaatcccagcactttgggaggccgaggtgggcggatcacgaggtcaggagatcgagaccatcctggccaacatggtgaaacccgtgactactaaaaatgcaaaaattagctggcatggcagcgtgtgaatgtaatcccagctactcaggaggctgaggcaggagaattgcttgaactcgggaggcaggggttgcagtgagccgagatcagccactgcactccagcctggtgacagagctagactccatctctaaatcaatgagtgaatgaatgaatcaatcaatcaactaatatcactctattttcaattcatgaaaatacctctaattagggaatagccccaggaacaaagctataaggtatacatgatccaagtgtgcttttctcataactacagatacttatccttcacatacagtactttcactgttgggtttgtaccctgaggcagttttgtgaggaatacaatgcttaaaagtatacaagcacaacatccaaaaagtaaggaggatccaaataggaaggaatcctacaacataaactctggcattggtagccagaaaaaaatatagtgttatcctataaatacctgctggctgggaaactgacagaggactgatgtgatgttgctagcatactgagccatttccttcttgatagacttctccacattggggggaatgcggccagacacactggtcataatatcttgcaattctaggagaggcagggagggatctctgagggttttcatcaatcgctctacccagtcttttacctagaaagaaagcattggtaaaataggacccaagttaacacaatcccccaaataaaaagatatatagttgtcattctgtatacgtgggaaattggttccagaaccaccactcatatatgaaaatctgcacatacttgagccctacggaacccatgtatagaaatagttgtgggttccatatctcatcaatactgtaattttgatccatgtttggctgaaaaaatccacatataagtggacccacacagttcaaacctgtattgttcaagagtcaactatatctgaattcactatcatatactacttcttttcaataaaaatttatataattttcaatagatatggggtcttgctatgttgatcaggctggtctcaaactcctggcctcaagcgatctttccatctcagcttcccaaagtggtgagattacaggcgtgagccaactatcatagagtactttgaaattgcaacgtaagcatctaacattgcccctattctccagtttaaaaaggactaatcacgggcgggcacagtggctcacgcctataatcccagcactttgggaggccgaggcgggcagatcacaaagtcaggagttcaagaccagtctggccaacgtggtgaaaccccacctctactaaaaaaaaaaaaaaaaaattagccgcgcctggtggcacgtgcctacaatccccactactcaggaggttgaggcaggagaatcacttgaacccaggaggtggaggttgcagtcagctgagtttgtgccattgcactccagcctgggcaacagagcaagactccgtctcgaggaaaaaaaaaaaggagtaatcacaattaaatgtgaagtccatgacaaggataagaaacatggatttaaagacctcaagtcccacaactgaaggtgaaagagttctaggccaaacagctttcttttcctccctcttaaacaatcattatgagacttggaactattttggagaataggtatcccatttgtacatcccttccccaggagacgtgatacataccttgctgctaaagaaaggatctggaaggcagtatccattcattacattgaccagattatccaggacataatggaacactcgatggagtttctcgcctctgagtgccgtgctctggatccgtggcagactacctgtgtgaagttcagcctgtcaaccccaacaagagatcaagtcatctactacttttgatctaaggtacaaacacaccactgcacttaagagttatcattcaaaatcgagacatcatacccagctaccaggagggaagtcaatagaggaaacatcataaggaaattacagaatcttagtactacagtaactcttgcaaactctagttccataatactacaggcacaaatacaaggcataagattaataggggacaaagctaaagaaaacactggcaaaccaagcattgaaatcacttgcctctccaaaccaccaagttctttagctcttagagagcaatattcggagcaccttcctactcacctgctgaaccttgctggggttgtccagttgcattttggctagtacacagccagggtcaagagctgctccaggtcgcttgacgtaatggatacagccagactccacagctgttaaggtcattaccatcttcattacctatagtgaaaaataaactagactcagatttatctctctttacacagatgagtgcttaaaagaactaaaatttttcccttagcatctaagttggaccacacctaatttgaccaagaaaaaatgggaatttaccatcatctcctagggactatcaaggcaagcaattagaaaatctctcagtacctcactttaggaattaataacagttattgacatttctcctttctaacttttacaaccattttggcataatttgtgattatatttgttttgtacttagaaagtaaggaacaatttaatatcctcataccagtgaatccaatctaagacaaccaggccaaaacctaaggatcattcttcactcctctttctcccttacctaccaattaccaacccagccagacatatcttctaaacctttctcaaaaatcttcctctcttgccaactcttcggtttacgccttcttcatttctggcccaaagtacttcaaagaccccctaagagatctccctacttgctacatacctccctcaaggtcacgaaaagcaatcttcctagaccccaaatctcatcatactacttttccacttaaatctttcagagattacctgctgcctccaggatagtgaaaacttactagtatggtttataagatccttcataacctcacattcaagatctcacattacttctttagcacctttgcttgtccctccccattaaaccttagtctattctcaagccacaccaacacatacttgcagttccctaaatacactgtgctgtcttgcttctgtctttgtacatgctattccttcaactttaagcactcttccctgcccttcttcacctgctctatcactatctgtctttcaaaactaagatcaaatgtctcttctttcagaatatcttcccatacaagcttagcttgatttgggttaggtgaccctctgcactctatgcttagctctcttaaaattaatcacatgacatttcttgtctgttttgtgccccacctccatgtattttctctggatagccagcagttaggacacctaacattcaacaagtgctattgcctagtatctatttttagaactagagattcctcatttgcctatgtgttttaaaaatcttaaggttcgcacttctaattaagccaactgatgtttctttttcattcttatttccaatctgttacctttttttttaattttttagaaatagggtcttgatttgtgacgcaggccacaaattgtaccactccagtacagtggtacaatctccattcactgctgccttgaattcctgggctcaagggatcctcccgccttagacaccagagtggctgggtctacaggcatgtgccactgtacgccgctaattttttaatttttcatagagatggggtctcaccatcttgcccaggctagtctcgaactcctgggctcaagcgatcttcctgcctcagcctcccaaagtggtaggattacaggcacaagccactgtgcccagcctcctttctgtaacttttcagtcctagtccatcccagccgacccttttcctaccttcccctcccatgatcccacagtcctttcaccaccctgacctcaatctcagcatagcactggccggcaaacacatgacctccatcttctacaatgtactggattaacttcccagcagaaggtgagcgcatcaccgatgggtcattttccttctcaaacacacaggttttattgccaattgtgatgcgatatctaggagacaagtggaagtatgtaagctaagaaagcacctcaggatgtaaaggagaatggtagagaatgtcaaccttcaaagaaaaaaaatcctgaaaactttattatacacacacacagacatattcactgcatatttgtttacaatgtcaattaacataaatttccttcaataaggatcagattaaatatagtataatcatataatggaataccacatgactattaaaaataacaggtaccaccatttaaaaaaacacacacaaagatattgatgacgtaatagctaacatttcttgaagcctagctatgttgtggcaatgttctacacattttcaacatgttaatttatttcattctcataacaccataactggtgttgaacatttgtgaatttcttttttttttgatacggagttttgctcttgttgcccagactggagtgcaatggcgtgatctcggctcaccgcaacctccacctcccaggttcacgtgattctcctgcctctgcctcccaagtagctgggactacaggcataagccaccacatctggttaattttgtatttttagtagagacagggtttcaccacattggccacaccggtcttgaactcccagcctcaggtgatccacctgcctcggcctcccaaagtgctgggattacaggcgtgagccaccgcgcccagccacatttgtgaatgtatttaaagaaaaacagtatgtacatgagtgtaacttgtatatgcatataaaatttctactcaaatatgtaagaaacttttaacaatggttacttataaaaaggggaacttatttttcattgtccacatacactggagtggtagggagacatgtttttaattataaacactttaatactcttgatatttttgttaagtgcatgtactattttttttttttttaactacaaatgagtaccaagaaaagcctgggaaaatcccaagagctagtagctaataagagaaaaggctaacaggatgaccagcaaatggacctcaaacagccacttacctatccacttcctctttcatatacgtagtataactgctgccatcataggacaagagcagtccaccgtcactcagccgatgtacatctacttctacacatgagccattcatgatcaccacataggagttgggggactgtcgagtcacctgtagggaatgagaatgaggatcagtgtgtcccttccaggtacagctccaaatgaaatttgaatgcttcaaaaatacagataagaaagatctgtcaggaggaagaaaattcatggcactgatgctatttgcatcagtgtctgtggacatggctcagtcctgctgtaagcaaagagggcaaccttagttgattttccccaactgtggttgttctctgtctctcctttatctcttggcagtgtatgtgaagttgaagaacaacaaaaaagattttcatagaacaacaaacgctgcttcaggacactgacaaaaataatgacggtaatttcactaatacccccatccctgcattaaatcaaactttttctcctgcctctcaacctaaagaaagatagctaaaaaagtaaggtgcaagctccaatggggttctgcataccttaagtacatacttgactccctcatagataagttcaacatctactgtattcagaagtgtatgagcaggaaggacttgacccctgaaagaacgatgagagaggaacttactacaaagttctaacagttataagagaatctaaaacattattgattgtagcatttcctagaataacaaaagactagaaacaacctaaatacctaaatgatcgtttgtaaggaattgatcacatcaattatgaatcttacaatggatttttttaaattagggtaaaatacacattacattaaatttgccatcttaaccattacaaaatgcacagttctatagtgttggggatattaacactattctgcaaccaatctgcaggactttttcaactggcaaaagtgaaactctacacccattaacaactcccaatttcgccctccccccagttcctggtaaccgtcattctactttctagttctatgagtctgactactcttcatacttcatataagtaaaaccatatagtatttgtctttttgtgacaggcttaattcacttgccctaatgtccttaagatccacctatgttttagcatgtgtcagaatttccttcttctttaaggctgaataatactgtattgtatgtatatgccacattttgtttatccagtcatccatcaaccaacatctgagttgctcccatcttttagctactgtgaataatcctcctatgaatgtggctgtgcaagtatctttcagaccctgctttcaattctttcagaatacccagaagtggtattaccagatcatagggtaattctatttttaattttttcagtaattgcaataccatttttcaatagtggctgcatcattttacattcccatcaagagtgcacaagtgtcccaatttctctacgtacttgccaatacttgctattttctgttttttgacagtgggcatcctaatgggtgtgaggtggtatctcatcatggttttgattttatttacttaatgattagtgatgttgcgcatgttttcacatgtggaacaaaacatacagacattaaaaagatgtgaactaaaaaacactttaaaaaatatactgttgagttaaaaaagcaaggtaaataacagcttcacagcatgctaccatttgagttttaaaaaaccaggaggtgggaagaaacaaatattgcatgttgatatggttcggctgtgttcccactcaaatctcatcttgaactgtagctcccataattctcttgtggtgtgggacggacccagtgggagatacttgaatcatgggggcggttcccccatactgttctcatggtagtgaataagtctcacgagagctgatcattttataaggggaaacccctttcacttggctctcattttctctcttggctgccaccacgaaagatgtgtctttgctcttcctttgccttccgccatgattgtgaggcctccccagccatctggaactgtgactcaattaaacttctttcctttataaattagccagtcttgggaatgtctttattagcagtgtgagaacagactaatacacatatatatgttcatgtaagtttagggtatctttggaaggttagaaaagaaattggtaatatgaatttactataggggacggaaactggatggccaaggaacagaggtaagagagagacttctcactgcttatcttttttgtgccttttgaattttgaaccacatgaatgtgttaactgttcttaaagataaagattaaggttgggcgcagtggctcacgcctctaattccagctatttgggaggccaaagcaggcagatcacgaggtcaagagatcgagaccatcctggccaacatgttgaaactccgtctctactaaaaatacaaaaatgagctgggcgtggtggtgcgtgcctgtagtcccagctactcatgtggctgaggcaggagaatcccttgaacccaggaggcgaaggttacagtgagcagagatcacgccactgcactccagcctggtgacagagcaaggctccatctcaaaaaaaaagattaagattaaacgcgaaaaaattataaaacttcagtgtaagcatatctgctcctagcaactgaaactttatttgagagtctttaaaaaggccgggcagccgggcacggtggctcacgcctgtaatcccagcactttgggaggccaaggcgggtggatcacaaggtcaggagattgagaccatcctggctaacacggtgaaaccctgtctctaataaaaatacaaaaaaaattagccgggcctggtggcaggtgcctgtagtcccagctactcgagaggctgaggcaggagaatggcgtgaacccgagaggcggaccttgcagcgagccgagattgcgccactgcactccagcctgggcatcagtgcgagactctgtctcaaagataaaaaaaataaaaataataaaataagtaaaaaacaaaagcattttaaaaggaggtgggtggggggcttgtagaggaaaatgcatttgacatatttgtacaccaataagaaaactatttaactaggttacagattatatgttgcagaacagaaataaataagactggattggtaaaaagcggcccatgtatacagggagttgaaagtcacgccaagggatttagatttgatacagaagagaaatgccaagctgctgaaggttttactacatgagagtaacatagtgaaagatacttatcataggacttgaataactctgaaatctcagttcaatttttaaattttgtttcttttctttctttcagatacctcaaaagggagttgatataagtctaacaacacagaaggaaataaaagtgcctgtgattaaagtgctttaaaatgattagccacttggaacattcctctggggactcaaaggcagagcttagtctcctcaatcagcaatagaaattagtttagccccatagatgtctgaccctctacttgaaagactcatgaggtcatcctgaatatcagccttaattatttacttctgaaaggtggtacaagtaatacatgaaatatttagggttcagtgctagggagaaataccagatttttatcaccagggtttggagagatttgatacttatacaggacagaataactactgcagatggattccagtttttaaagaagcaacctgttctaactgtggtataagttaatgtctagaatctgcagtttgactccccaaataatttgccataaatgtcaacatcccctctttcttgccaccatggtccatgaataacaagtagcactcataagctgccaggaatggacagaagaataaatgggtctttgagcttcagtccctgtactcaggaccattgattagtttgtgtagcctacaagaaacaaagcctacctttctaaggagtgaaggaagttagagacgctattccgcaggctcacatctgccacgtggagggcaccacacacaacccccaacatggtgtcaggtcgctcagcctgaaaggaggaaaaagagggcagatcaaatgcatggtcacttggcaccacagcctctcaaatgaaatcaggctcaaatttgttgtgatgaaacagctagcaatgaaaatctccattctcactgcccaactgattttttagataaaaatgaacacattcacttttagaatttgattagaggcaccacttgaagagaaatgaaaaacaactttcttcttttctccctaagacttccacttagccaatcattgaatagctcaaaaataggcttctgacagaaataaatttaaaaagacacaacgatttggctactgataatctcaaagaaaaacggtgtatagccaaaatttggacctccaaattatatgaatctaacgattttatacaaaatcttggataatttagcatagccccaggaattaaggaataagtgataactcttgatctaaatgaggcctctctcttcagcatctggtagatacagaagttggcaactatggaccaggtttaacattaaatgaagaaaaagaaagtaattaaatccctgcatgcctcacttcaaatatacctcaggaagtaatgctagaacataaaatgactgtgtgacacaagcacaggaaccatcagagtgctaaaattacactgactcctagatttttccaggtagatcaagaaccatttacattagaatcaaataaatttcatgtagtgacagggattgagtacacaagtctataaaaacccaatcccagcatctgtttgtggagaaatacacacctgtactttttctgctatcagtctgtccagccagccagtatcaattctgttcatctgaaagctttcagtctctaacaatttgatcaggtattcaactgtagttcgaaagtcaccccgaatagacagctccttcaaagccaccaccatgtttctgggagaacagaagccaatctgtttcagcaacaaacactttaatgtttttcaataattttaaagatctgtttggccaggcatggtggctcacgcctgtaatcctaacactttgggaggccaagacaaggcggatcacgaagtcaggagattgagaccatcctggctaacacggtgagaccctgtctctactaaaaatacaaaaaattagccaggcgtggtggcgggcgcctgtagtcccagctactcgggaggctgaggcaggagaatggcgtgaacccgggaggcggagcttgcagtgagcagagatcacgccactgcactctagcctgggcgacagagcgagactctgtccccccaaaaaaataaaaataaaaataaaagaaagaactgtttcattcctttggaatcttgagagggaagggagagaggcagttccaaaaacaaataagggtgcacatgtcaagtgtgctcattcatgtgcattcaagagagggaaatttgcaaaaagtcagaaaacgtatgaattctaactgatattaccataagagcatcagcaaatcagaaacatttcattataatgagtacagaacaaattataacaaattatatgcaagtcaccctcagcttttacttactaagtttccattattccattcatttgttgttggctaacaagaattagggcattaattctccctatccttgtaccttatttattttatgtataatttacatacaataaaatatacttattttaagtatacagttcaatgaattttcccaagtgcttaatttaaagatttccatacagtaaagcaactctctgggtgcagtcatatatcagcctgacactgcatgtgacagtgttttttttaaaactgcattttggatatctatgcaatgatttgctcattacttttattacttcccagttaagtgcaaagtgatccaattttagcagaatttcaaatactatggggcttttctgtatatttatgcccagtgtctatcctgcacgggacaggtacttacttccacaaatactaattatgtacctcatactaataagacacatactatgattgtaaggaagaaagaacataaatacaataatcactttcaaaatatatggcagaatatcatcaatgccagacagaatacttacacaaagttctggagaggttgtaagaagggagaaattcatctccctacagtttcatgaaaaatgtggaaactgacatgggctaaagtatagctgataattataactgtgagaggaatcatattccaggtagtccaggcattccctcagcctaaaatattattctgttgcccacctctgtcctcctttctgtgtcctcctttgacctgacttacttctacaaacttcaattatcaatctagatgtcactgtcttctgggataccttcccagaacccctctagactgagttagttgactcatctgtatgatcctataatgcccttaaataatctgactatcatcatacttaatacattgtattttaactgccaattgtcttacaccctctggattgtaaagttttgtgaggagagagattctatcttggacctcactgtattgccagaaccagtagatagcagatactcagtaaatatttgttgaatacaatgaatgaatgggcctggcacagtggctcacacctgttatcccagcactttgggaggccgagttgggcagatcactcgaggtcaggaattcgagaccagcctggccgacatggtgaaacccgtctctactacaaatacaaaaactagctgggtgtggtggcgggcactccatgtcagaaaaaaaaaaaaaagaataaatgaatgaacagaggaaatagcaagaacaaagaagcagagggaagaaaatacaggttgacaaaattagccaggcatggtggcacgtgcctgtaatcccagttactcaggaagctgaggcaggagaatcacttgaacccaggaggaagaggttgcagtgagctgagatcgtgccactgcactccagcttgggcgacagagcaagactctgtctcaaaaaaaaaaaaggaaaatacagcttgagttcagggaatggtatgattgaagcagaggtataaggataggaatgagtggctaatccattcaaccaacgtttactgaatgcttactatgttcaggggatatagcagtaacaagacacagtcctgttctcatggtatttagattatgacccatgggaaattatactggaatatactggaatatatgagttggggcattctggcaaacaagagtccaaaccccaagctgagatatagacctaatgaaatgaagaaataagaaacaaagaaagctctaagctgaagaatgaacttttggcatagtgtcaagaaggagacttattgtagataacgtatttttaacatgctaaaaattaagctagttagctttgtactgtagacaaatgtacagagctggtcagaaataaggaacaaggcttctggattgggttataggacattccctgaagaaaatacacagtggtctgccaaatcaggacttaaacctaaatgccaacagaggccagtctgggaacataaatgagtgaggcagactgaataggagctgtgttaactacaaagtttatgtcccgtcgaaaagaagcagtcacacaaaactagctgttttttgtttgtttgtttgttttttgtttttttgagacggagttttgctcttgttgcccaggctggagtgcaatggcgtgatcttggctcactgcaacctcagcctcctgggttccagtgattctcctgcctcagcttcccgagtagctgggattacaggcagttgccaccacacctggctaatttttgtatttttagcagagacggggttttaccatgttggcgaagttggtctcaaactcctgaccttaagtgatctgccagcctcggtctcccaaagtgctgtgattacaggtgtgagccaccgtgcccaggcaaaattagctaacttttaacaactagaatgtacaaccaatgttgtcattatagtcctacttttaagagctagcagaaatccatattttgatttcaatctcctgattttttaatattgtcaaattaaaaaaaattaacactttgtgagcccatcaaaacacatctgtatgttgagactcaccagaaagccaacaatttgcaagctctagtgtaaacctttttcactttgcagagcataatatggcagcgaatatgcttaaaaggcaacttcataccaatgtttttttctggtagcagtgttttaattttgaaaaattccacttatagttttgaagaatgagaagaaatgtaaaggacaaaatagagaaataatgagatttccctacttctaaaaataatattaaaaactaattaatcaaggctgggtgcagcggctcatgcctataataccagcactttgtggggccattagagcccaggagtttaagactagcctgggcaacaaagggagaccccatctctacaaaaaatttaaaatttgctggacatgatggtgcacacctgcagtcccagcaattcaagaggctgaggcaaaaggattgcttgagcccaggaggtcgaggtttcagtgagctatgatggcaccactgcattccagcctgggtgacagagcaagactctgcctcttaaaattaattaattcaggaaattgataaaaatataaaactaatcaataagtgtttattaatacaaacaaccatatattaggattaattactaataaacaaatgctatttattagtaattaatactaataaacacttattaattacctactccatgtacagtacaaaggtaaagggaatggtattaaatgtttgatacaaggcaataaaccattaaaaaacagaaaagaactagttcaagtttcaattttagatagatattccaaaagatctaagctgttaaaattacctccttcagccctatgttttaggcaagcaaaagtgctgttaatttaatattcattgtttatgattaacagaatattatctaacatttatgatatagcagttatatttgcataagctgttatatacagcatgctaaggtctcttgtattagcaatgtagacagtttctttatgtccttttcataatatgagcagtataattttattattttaaataactataagagtacatcatggtgactatggctcataacaatagattgtgtacttgaaaattgctaatagattttaagtcttctcacaagaaaaaaataaaataaaagtctatgatttatttgatacctagttcttggccaagaatctacctcccctcaataacaatactgttcctgtggaaaaataagatacctttaaagcaatcaattttatacatttatcaaaaatatttgaaaggaaaaatacttcaaaaggctcagaacaacaaacagaaaaacatctgccaagcactgcataatttaatacaacatgaatgcaagtgtaattaaagatattcaaaatttcttcaaaaaggttgttcatattattactttgacagcagatgattcctattcccatgctcacaccttcacttaagattagcacaaatttattttgtaaaatgcaatcaaatgctattatactcacgaaattgcctcttctctgttttctccccaagaaaagcagtgaccaaactgagaatcagcaaattcatgaagtccccctgcagcagcaacactgaaatatccccaaacattcttattgctgcggaaatttagctcctgaactgttcctgagctgggcttaaaaccctgttagagaataaagaatgagagaccatattatgtttcgaaggaagagaagatttatatattcattgtttaagttctctgttaatcacacacagaagcagagaagacacacaaaaatgataaaggccaagacccagtgccacagacccactgaagactctacagtgacttaagtgggattaagtaaccaatgaagcaacaaccatttacttatctgctctgagaaacctctatgtttcccactccagaggaagtcccaagatatttcagaagtatactttcagatactatcttaacattaaagttcattaaaaggaggtataaaccttttaagtgatgggttacctcatctggattttcactagtgatccgagcagcaataacatggccccttggacaaggaacgtgtgcagaatcttcaaaatcaatgggagaatcaccccagggagataccccatacatcatacggatatccttgattctatatagaggaatccccatggcaatctgaaaggtaataaaacacacatctttaatttttcagttacttcccttaaagtgtagaggctatcagataacctaaaatatttttatttttggagccactccctaaaacattctatttttataacctgtattctacaatcatcaactctaagttgcttgaaatacaatatatcactacagataagtagttagaatattctccacttctaaagaagtccccacattcctaatgcaacagacaccagttcccctgttgtcatttctccatcacgtaataagaatgaaaatatccaacagaggagtaaatgttaatagccatccaaaaacagacagctagaaagtcttaattgtgtcataattatctcttccatccctgcaaaccactggaggaagtaagtaaatctttagtctttaataggaacccagaaggtgttctcgatgtgggcaaatgttagataaaaataatatcaagccttatcattaactattactgctttccataatatttgtttcctgggctgagagaagacaataatattgacagcaagcactttacaaattataaaaatatatgtgtgctaccacactcttgtaaggaaaaacttcaaccactaatctctgatgcagaattatttcaataaagaacactagtaaaaaaacaaaaatgagtagggaataattataatacaaagttgtgaagtttactatagctaaataattgaataaagcatacattattaacatttatttctaaaacatgacacattatatcagatgtgtctggctagaaaaaataacattcctatgtctgtactacatcaggaaaaccaaaccacacatgcataacacatacagggtgaaagagaaatgaccattaggtgtgactcagataggaggtgcttttctcttatcacacactggttaaacccatttttcaggcctctctgacttttctaggctctgcaacccagatcagggagactcacctggagctgtgctgcagggagattgacatcagccaccatctctgtacaagggtgctctacctgcagccgaggattcaattccagaaagtagaagctgccatcctggctgtacaggtattccacagtcccagcactcacataacccaccattttggcaagtttcaccgcacactcaaagaagagagataagcaaacataagtatctcaccttatccaactgctagaccactacagcctctcactgactcaactgttcagtgtgtataagagccatcaaaagcttttagccacatgagagcacatttctgattattatacaatatccctggacaaggatgaaaaactcaatgaaaaatcgggagaaaagagcatttttcactttgcatcaaaagcaacctcaccccaccagacataaatgcatgcagacaaaaaaacatggggacagactcttgtccagtttccagtatttccaatatgctcctcttcttcctagaaacatagctaactagttagagactagatttttttttttttttttgagacagagtctcactctgtctcctgggctggagtccagtggcacaatctcgtggctcactgcaaactctgcctcccgggttcaagtgattctcctgcctcagccccccaagtagctgagattacaggcatgcgccaccatgcctggctaatttttgtatttttggtagagatggggtttccccatgttggccagcctggtctcaaactcctgacctcaagtgatctactcgccttggcctaccaaagtgctgggattacaggcgtgagccaccatgcctggcctggttagtggctaagttttgacaaacaggacaccagcattggtaagtgatatgcataactcccaagtcatatatatatatatatatatatatatatatatatatatatatatatattttttttttttttttttttggagatggagtctcgctttgtcacccacccaggatggagcacagtggcgcaatctcggctcactgtaacctccgcctctcggattcaagtgattctcctacctcagcctcctgagtagctgggatcacaggcacatgccaccatgtcaggctaatttttatatctttagtagagatgggttttcatcatgttggccaggctggtctcgaactcttgatctcaggtgatccgcccacctcagcctcctaaagtgctgggattataggcgtgagccacagcacccagccctaagtcatattttgaaaaggaaatgtctcattctctattcctggctttttccttcttattcattggaacatagtcatgatagtataagccaacttcaatcatgcaaatgagaacacactaagaacaccaagaaaagaaaggaaaagaaaagaaagaaaaagaaaagaaagaatgaacctgaatcccaagatggtctcgtggaataaaacacttccaccagccctgaaaagctcacctcagactaggatgggagagaaaaataaacttctatttttgggggggtccgctgtgttttttggacctttttgttatagcagtttaacctgtatcctaatcgatacaggaattattaagtgcaggtagaatgttgctgtttaaaaatattaaaatatgagatgctagcttagcaaaagggtagtgggtagcagagaaacagatactgcaggctggaaaggtgataatctccttgttgggataacacaacatttggtaaactgtttcctacaataacttgggatactgaccacacaccaactaaaccttaaaaaagatggtctgaaagggtcagagtgtcgaaaaagccaacttcttttgtatccccccaaacagaaaatgagattatcaccctgaagcaactcagtgtcaaagatcaaacgtgctgctttagtttcagctggccccaagatagccaatattaaatcaaggcaagagagataggctaagcacagaagccagtaaataatagaagaaaagtttctatatctagaagaaatctatgagtatgattaatccaacccaaagctgattgcaagcaaatagcccagaagcttagttaagtatttgaaggaattgtatttctaaacaaaccacaaacctggccttcaaaagcctgcgactgatgattgggatatttgtgccctcaatcctgcaccagcaggaagtgggttgtgaaagttctgccaaagaaggcatagtctccaaagcccaactcacagagaaaactgaatgaggaagaacttcccagaaaacaatgtcaggtgtcttgaaggacaatgaacaagggatttactcccttattgcacttctctggagtgtgcagtagcagaaccagggacagccaggtctaactgaggtagtattctattatatagcagggaatcattgcaattcctacctaaaaaggaggatttgataactgctatggaccaacgattgctatgtatttttcatttttccaaatgagagttatcctgttcctattccatcattgtatatgggtgtatggtgaaggcaggggatataatactgggtaaataacttgtattttgagtcactggcccatgaaaagccacaatacatatctaatggagaagaatatacatcatatagagatccggaatcacctccagtaataacccatccagttactagtaactggatggggcttcaggttgtcttccttggacaaaggctatgtgtgctctgaaagtaggaaaaaggataaagggataataggtagccagaggaacagactgaggcacagattatgaaatgccctccagtgacttttctctacttcatcattttaggaataaaatcgaaatttttgctgagcacatggtcacccagttagtgatcacaattcctaacatcctttgtgctaggtataattgtgtaactgaattttgtccagtggaatgtgagcagaagtgatgtatgtgacttcaagatcatgcttccatatgcttgccctccacatcccctgtctcttcctcccacaggccacaatgtgaacataatcttgtgtgagttagcttaatcatgaagatgacaatgtccaagagcaaagtttggcaaacttttttggtaaagagccagatagtaattattttcaattttgtgggccatatagcctctgtcacaactattcaattctaccattgtagtgataaagcagccataaataacacataaataaataagcatcattgtgttccaacaaaattttatttacaaaaacaggcaacaggtgagcaataaacctgtttctggtaacagctcatctctgaactatgatgaaagagaaatagaaacttacaccttgtttaagccaccgtattttgcttatttatttatttgttttgagatggggtcttgctctgtcacccaggttggagtgcagtagcatgatcaaggctcactgcagctttgacctcccagtgtcaagtgatcctcccacctcagcctcccaagcagctgagagtacagacgtgtgccatgacactcagctaatttttgtatttttagtagagatagggtttcaccatattgcccaggccggtctcgaattccagggctcaagtgatctgtccgccttagcctcccaaagtgctaggattacaggcaagagccaccatgcccggccaagccactgtattttgaaggcatctttattacagcagttcaagagtacatcctaatatatacacaacataggaaatagacctctaacacacatgaaatatattttgaagaatctattttgatgtagagactgggttaggactccagaaaagactatgttcaggcctctaaactatagttattccgaaggcatcgctcatgactttgagaaactactttctatacaaaaagatagaatgtgtgaactctgaagatatttagaggactttccaaaaacgataatagagttgattaaattcagctgaagacttgatgatactcaacccagcaaataaaactacctgattatgagcctcttaaaaaaatcaatcataagattaaaaattccaaaacatttctcttctttatccctgtatcctgaaatggtacgctgattttttttagaaagcgttaactacttttagaagcttgacatgttccttgacaattctcttagtgggagaacagtagaattttttttctctaagaaaaggatataattttattaattattcagaatcgttgcttaaaatgccattgttctcagattggtacatgaactgaatgaaaaatgttctatgtaagaaaacataaagtaagccttttaatatatgtacctgttccatgtgttcaaatactgctggagtagcaatagtagcaggtgcttcttcaataatcttctgatgcctgcgttgtacagagcaatcacgaccaaacaaagagatagcattgccatattggtccgctaagatctgcacctccagatgacgagattgtttggctagtctcatcacaaatatgggagatccaggaacttcagcttgaacctgtattagaaaagggggaaaaaaaaaaccaattcttaaattttaaactttttatctatcttgataagctactttgatttcaacaagcagatgtccagaagtgtcaggaaccatgttaatcagcagaaatacaaaactgaataaaatacagtccatgctgtcatctttaatatctttaagatgctgcattcttacataaccaatattaattgataaatatgaaaacatacgaacatctggtgcatcacaaaggtaaacaacaaaatatttgaaaacataggcacatacacaaatccaacaacagggcaaaatactgccatcctgtactctgtacaaccaaatgtacaacttgttccagacaagatactttcctggttcacattacatcatatatggtattgttgcagccaaaggactttcatctttagttttgaagaatattactgttggggacagaattctaaaatggtaactattttttttctcagcactttaaataatcccaatgattttcagctttcactgtttctactgagatgccaactgtcaatcttattgttactattttgaaagtaatctttattcctcagctggtttaagattttctctctttctgtcttttataggggggagggtggtagatttactctgataagcatagatgtggttctttgtatttgtcttgcttgaggctcatagtgctttttgaatctgtccttggtatcttttatctgttcaaagaaattcttagcttttctctcttcaaatatggcttctgcttcatcatttcttcaattattgtttctgctccattctctttctcttctcctctgagacttaaagtacatgatgttagaccatttcacataaccatatgtcttttatgctctgtatcttttttgctctgttttgccatgtagcaagtcatctcaaaactcagtggcttgcttagaacatcaaccttttatgatgttgttctcatctgggcagttcttcttctggtcttgcacttacatacatatcatcatctggtagcttgagtggggtagaatggtctcactcagatgtctggtgatttgtgctgactgctggctggtaggtctagggagcctcagctggaatcgttcatctccaatgcaggtggcttctcatcctgcagcaggctagactaggcttcttcagtgatgtgttccaagaggggaagaagctgtaaggcctcttgaggtctaggctctcgaatttatacatcactttggccacattctaatggtctaagcaagccacaaagccagctaagattcaaggggtagggaaaatagatgccacccctggaagggaggaacagcaaagtcacattgcaaagggtgtacatacaggaatgggaggagttattgtcgccatctcttgcaaacaacttactatgctctaccctatggccacaataattcacatacctcccacatgcaaaatagactcaccccctcccaagacccccaaagtctcatccaatcatggcattgggcttgacgtccattttctcatgagtcatgtccagaagaaaatgaggttccttgggtgcaactcctcaggtacagtttctcttgatccaaagacctgggaactaagaagacaagttatctggcccaacactcccaatatttatgatgatattgggaggggataactgcaaatgagactgctgttcaaagaggaggaaataggaggtacatagtagtcattggtccatagcaattctgaaatccagataggtacatgctgtcagattcccttactccagggtcaggaatgcttttcattttgttttgttttgttttgtttttcaggatctagtttggttccctgggagtaggtccttaatccatggcatcccctgctcctagctctgccctctgggctcctgactccactctctgagaaatccctctttttatttgaaatgacagctatttacagctgaatagctttctgtctgcttcctgctcattaaaaagtttaaggctcagaggtcacttttcattttgaactgtttctggccctttcagtcccttggtgcattcatcaacacaagtctcttgacaactttgtgggtttcctatgaatcatattggggttcaccgctcacccaaagagacacatccacaactcatgtctgcatagacctctctatactttgggcacgtcaggatgctgtgagacagtacccttaagatacttagggccaggcatggtggcttatgtctgtgatcccagcactttgggaggccaaggtgggaggatcatctgatgtcaggagttcgagaccagcctgagcaacatggtgaaacctcatctctagtcaaaacacaaaaactagccaggcattgtggtgggcacctgtaatcccaactactcgggaggctgagacaggagaatcacttgaacctgggaggtggaggttgcagtgagccgagatcgcgccactgcactccagcctgggcgacagagtgagactccctctcaagaaaacaaaaaaaaaaaagatagttagaagcatgtttccagctgaaagcattaaaaaaaaaaaaaagatacttagaagcatctttctagctgaaagggtaatttattagctactaccttaaagatttctgaggccttaaagtcacaggcactcttgacttggtctttactctgaggcattttttactttgcaaatcttttgccagctggagagactcgggatgagaaacaattctattttcaacaagttctgggtcctttacatttctgtaaattctgcttgtaagcaaaacatcttctttagcttacctctcttttacagttttttagcataagcaactagaagcactccacagatactttaaacacttgtagagagctccttaaccagatccatgacttcattaaatatattatttgtcttccaagttacctcagataacatttttttgccaattgttccattattacagaacatggatcttttttccagactccagtaacaattactacactgcttttccagcctcccttaacaattcatcattcttccagtcttcattaacatcctcctcaccaatgttcagcctacacctatgagccagttttaaagtcaatgtcttacgttttacttttctgttatggcaacatcataccgttaggtatcaatttctgtgtcaattatccattgatacctaacaaactaccaaaatcttagtgacttggtatagcaaccattttattttatttgctcatgagtgtgtggatcagcattttgaactgggcacaactggcagttctgatcttgcctggagtaattcatgcagctatagtcatctggcagctcaactggggttagatggtcaaatatggtctcatttacatgtctcaaatgtggtgctgctgactgtcctagtaggactaggaggccttagctgggacaactcatctctgctcatgtgacctctccttctctagtaggctagaatgggctcttcacatggtagtctgagggcttgctccaagacagcaagagcaacaactacaaaaccattgcaaataatttctcacattgctctatgtttttcatccttttgtctttcttcatgcttcagtctgaatttccttctgatctactcaccagtcgttaattatttatctttttctagatttttttgttttgtcacccaggctggaatgcagtggcatgaccatagctcaaggcagcctcaaactcctgggctcaagggattctcccatctcagtctccagtgccagttactgattctcttcaactgcatctaatatgctataattttaaactcctatattgacttcttcttcttcttcttttttttttttttaagacaatgtcttgctctgtcacccagactggagtgcagtggcacaatctcagctcactgcagcctctgtctcctgggttcaagtgattctcccacctcagccacccaagtagctgggattacaggcatgtgccaccaggcccagctaatttttgtatttttagtagagatggggtttcatcatgttggccaggctggtcttgaacccctgatattgacttcttaattttagttattgcattttcagttctagaacttttgtttcttctttatgatttccagttctctaccaaaattctcaatcttgcctttactttccttgaatatattacgcagaattactttaaagtccttgtctgataatctcattatataaaccctctgtgggtctgtttctactgttttgttcttcttggttttcaatcatctaattttgtatgcctattttcaattgagtggttgataagctgtaagaaaaattaatagaaataattttaagttctggatgttatctttctctggaaaggatttacatttgcttcctgcaggtgtctagaagcactagcaatcctaaaacatcttgcttaaatcagaggttgaatgttttgaagccaagatttagtccctgtgagggctagtctatttccagttcaccctttctcccatgatgtagtcagtccttaaagatcctaacctaaaatgtgggaggttttccagggcacccctccccaggaagccctcttagtcttttaagactgttgaaaacttatcagcctttctactatcttgaactagaagatatatctaggggaaaagtagcctcatatgtcaggctcacatctctgggtttcctttttctcttgtatgttagccccataattcttcactgtcttgaatggtctctaatgccgtaaaatgtaatatatctatatctatatctatctatctatctatctatctatctatatatatatatatatatatatatatctggttcagcttttctagtttgttcccaatgggaggattagtttattcagccaactagtattgaaacttaaggactttcacagaaaaccttcccttagtgttttaagacttttccactatttgattccataagtaatgagtagttttgaaatgtctgtaagagttaacattaattaacatgccttttttttctttttgcttctaagagcagtcttttttctctagactctctgagtcactgatctacctatgaaattagaattcaatgaaaaaaatgtaaaaaaaaaaaaaaaaacccaaggtaatattcaatttctgacacttaaaataggataatgtagcaaaacaataccttatttattgatttatttattttacaattttttgtagagatagagtctcactttatcttccagactgatctcaaatttctggcttcaggcaatgctcccgctttagactcccaaagtgctaggattataggcataagccaccaatcctggccaagacaacacctttatcacttcctttatctagtacagatgctctttgacttacaataaggttatgtcccaataaacccaacataagttgaaaatgttctaagtcaaaattgcatttaatatacctaacctaatgaacaccatagattagtctagcctacctcaaatgtgcttaaaacacattagcctacagttgggcaaaatcttctaacacaaagcctatattataataaagtgttgactatctcatgtagtttactgaatgttgtactgaaagtgaaaaacaatagctgtatgggcactcaaagtaagatttatactgaatgcattatcacttgcacagtattgtaaagttgtttgtttgttgattgtaagttgaaattttaagttggggaccacctgtatatgaaatcatggaagacccagctcataagactttccttttaactcttaacagtgaagcaaggagtttgctgctaagtgttttaagggaaaaaaaaaaaaaagcgaaataaaaggtagcatggcacactagtaaaagaagtgcaaagtagaagatgatgaggaaactatgaaaaagagggaagctaggagagtgaaaagagcagacttctgtcccaattttccattttttgacaaatcttttactatgtattggtaggaggaaaaaaagtgagttaaatatgtgagggtaactctgaggacagaacaaaaagagacccctgtctcccttttctctttctgtttaagattctaaaaagacatcacttctttggtcgtctccgcaaccaatgtatagtatggccacatcaacttggctgcaaagcagagggtaaggcaaagagagatcctacatcgagctttcctgagtcactctcagttcctatatactgtaggcctgccatagggttcctgtgccagggtgtggtggccatgcaacacgggctagggtatagagtgctgggacagcagggtagatgagacatatgatagaaactcagaggtctctaggcaatgtgaactaaagtgagaaaaagtcaatcagagagcctgggcctggccaagccaagagcaaccatatcagtatcataccaccatatcacatatgacctacaaagtcagcagaacaggggcacaaaaatacagaaaggtattgatttttctttgccattatgaggtcctataagccatacgcaccaggtaggaaagagctatctgacaaactgagcacgtttatataagacagaataactctactgtttgaattacctaattaaataaaacttaaaattgagttggacatttcattaaccttttttctctgctaatatgcaggtagaaactagagagaaagacagttagctatagacaaaattaaaaattaaatattttctgggcatccaaattatagtatgagttaaatcatatatctctgatatacatgttagttcaaacaaacaaaaacagcttatactctacctgtctgaagagattagggaagtcatctgcattgttgacttttctaattcccttccctcctcctccctctgaggccttgatcattactggatatccaacttcctcagctgccttcaaaaagaaagaaaaaaaaaatagaagaaacagtgttattaccagggaaggagaaaactggcatttttctccctttaagaatgcagtcatttagtaattctaaatacaataaaatagaaagatcttcaagatacactatgaaaaaataaatagtagaacaatatttgtagtattaggttgaaccaaaagaaattgcctttttcatagatttaaaaaaatgactgaatataggcaatttcttatggttcaatctaaagtaatgtcacatgggtcaaaaacaaaattatatatgcattcatacacccacacatgtaagtgcaaagaagtgaagtccagagtacataccagcaatgatttagaaaagaatgggtccgggcacagtggctaacgcctgtaatcacagcactttgggaggccaaggcgggcggatcacctgaggtcgggagttcaagaccagcctgaccaacatggagaaaccccgtctctactaaaaatacaaaattagctgggtgtgatggcgcatgcctgtaatcccagctacttgggaggctgaggcaggagaatcgcttgaacctgggaggtggaggttgcagtgagccaagatcacgccattgcactccagcctgggcaacaagagcgaaactccatctcaaaaaaaacaaaaacaaaaaacaaagaaagatgcgtggatataaaactttcctttttcactgtatgtatttctgcattattggaatttcttgcttatagtatgcaggcatccatgtattacaattaaaaaaaaaaaagacataaggagttcacttaaaataagctgaagtggggttgggcgtagtggctcgtgcctgtaatcccaacactttgagaggctgaggcaggtggatcacctgaggtcaggagttcgagaccagcctggccaacatggtgaaacccctggccctattaaaaatacaaaaaattagctgggcgtggtactgcatgcctataatcccagctactcgggaggctgcggcacgagaattgcttgaacctgagaggcaaaggttgcaatgagccaagatcgtgccaatgcattccagcttgggcaacaaagtgagaccctgtttcaataaaataaccaagtcattcctttgtcaaaatattccagtcttttaaggttttgctacattataagaatatctttaaaatgtatcaccaggcctggcccagtgcttcacacctgtaatcccagcactttgggaggccaaagtgggtggatcacttgaggtcaggagttggagaccagccagcccaacttggtgaaaccctgtctgcactaaaaatacaaaaattagctgggcatggtggcggtaacctgtaatcacagccacttggaggctgaggcaggagaatcacttgaatctgggaagtggaggttgcggtgagccaagatggcatcactgtactccagcctgggcaacagagtgagactccaacccaaaaaaataaaataaaataagtatcacccagaaaaagaacatttcaatttttaatctatgtcaatcgattacttaatgaatgaaaatcttttatgcacagtctcaccttttctaatgtttctttattcttttctatgctcatataaacagaattagtatgatgaactcaattgctgagtgatagatgatcaaagagatagcttaaaaaaaagagaaagacttaaaaaaaaaagggggtatcccataggaggtcagtaagtaagaaggtaggccttttaaaaatatatgaaagctttagtcacaggtcacccattaaaaatattttggaagaattttaacactttaatataatgttaagtaaggagcggggaggtagaaggacaaaaaaatattaagtagaaaaaagtattatgattaccaacacaatacaaatagtaagacccaaaacttataattatcataattataagtataggaatctattaataaagatttgtatatgatataaatctatgagttgaaaagggataaaaaaatgaataggttaatgggcattatctttggatggtgtgtttgcatgtggctttatcatcatctttggcttttcaaattttctaccagaaaatgctgtttataattataaccagaaaaaataaaaaagaatgttagtcgataagcaaaatagctagaatagctagttccttacaaagagcttctactcttttgcaaattataacaaacaaaataaagcatttgaaattcaattagaaatattaattcttcttattaaggagattacaggatgtttaacttaaaatgcaaacaatacaacaaaattatttgaacattcagcatccctcttgaatttacatgacacaagtcaaactcaagcagtgtatttttctacaatagcctctttcattatctttcattatacctggaagcataaccaacactttaaactatttataaaagtgaaaggggaacaaattggagggaactgtaaggaaagaaaaggtaatgttggggaaaggatctccttttgcctaggttcacatttctacatggatagacaataattaagagtaacactttcagtctttcttggttcactcccttgctcctccccaagggaaaaataataaattatgtgattggtcaacttggaaggagggactgaatatgcatagctcagccttttcccctttgggatcagcccactgcacaggacatatgctctttgtcagctctcagccatacactaagctgaattaagctctctctctctgtcgagggaaatctgtggtcattcagcactgccagtaaccagtgggtgagtgagcctgcttaactctggtgtttagtttacaaatctgaatgttgctacacacttaagccattttcatcaacatctctgttcataataaagctgactgtttgatctctgcttcctggcttcttggttctgaattcaaccagtagaaaaagtatgttgtttgttgtccccgccctcacacactaacaggtggtagagagagagagaatcagcacctccttaaaactctgacttaatcacctaagaaatgttctgtccagatgagcagcctgcttcaaaatgaatttagattgtttacatttaaagtcacttcctcaatctgtactttttaaaggcaaaagacttatgcaatctaaagagaaaccagcgtattctatactttcaaactacacctcctggtcttacatccctaacaccaccttgggtatatatcacgagccaggctcccaatctccacatttgtgactataactggtcagctgaaaggtatcactccctggagttagtaacctacctgtagcccatcatccacatctttcacataacctttttcatatagctcctggggaacatttaagatacgttttgaaaaatcattttcctgccagtccacacgaagacctgcaacagacaatagcaacttagggcaattacaagatcttctgctcttgtcaattttctgctctgcattctttgaaatgctatcatatttacccaaaactgagagtggatgggagaaagaaggatgccataaaaccctgatcagtccttggggttaacaggatttagccacagcatgacccggcaacttgggttcttaacgctggcaaaagccagccgaactaacagggagcaacttataaaaatgcaaagacgtacaagatcaaaacaaacaaaaaaagaacatagcatacttctcacagcaactcagcaggcaaaataccttcaaactgtgtgttcaggcctgctccagggccaagaggtctgggaaataattcaatctttatgagcccttggaaatagaaatggcggttttattggcctcagcagagtcatgattccatgctctctgaacgtccctgtactcagccataaggggaacactatagcctctccattcaaacaagaacaaattcaaccttttattttaaactatttgacccagcagatctggagaggatattgcaatctccctggagagccagagtaacaagggttcaaatctgttcagcctcaagacagtggtcattcccatttaaaagaggttttagtgtatgtctgttcccagtgcttgagtacttaagaaaaaaaaaaaaaggttcatattgttatcagctataataattcacatggaactgtttaagggatgtgttgagaataaatcactttttgaaaattcttgcccctctggcatgcctggaagaaaggttaattactgacctcattttctgcatcaagggcaactgaggttgaatggtttttaaacagtcaaatcaaatcatcaatagattgtgggttgatatcaagaaaacattggcgccaggcgcggtggctcatgcctgtaatcccagcactttgggaggccaaggcaggtagatcacaaggtcaggagttcaacaccagcctggccaagatggtgaaagcctgtctctacaaaaaaatacaaaaattagccgggtgtggtggcgggtgcctgtaatcccagctactcgggaggctgaggcagagaattgcttgaacccggaaggtggaggatgcagtaagccaagatcatgccactgcactccagcctgggcaacagagtgagactccaactcaaaaaaaaaaaaaaaaaagaaaaaaaaagaaaaaaaacattggcaaggaaacatttgagtaagtgggttttaggtttttcctagtgatccaggctactcccaggcaggtctgaagacccaattccccctgggaagcccacctctgaggaagattctagcctacccagagtacatctaaacccacaaaaccatatacatgttttcccagagtttttctaagttaactcacaagatcactccagatcacaatttagcatctgtgtacctggaactaaatttatattactaaaagaatcacaggtgtattaattaagctaggagctacaaggtaccattaatcaaccagtattccatttcttgtcaagtataccaatactttttcaaaagaggtaagtcccaaatatcctactgagctattctgtacttcaagatacaaacaagaattcagttcttaccactgccgctccagggaagagttgggatacctgcagtttgagccactatggaagatgcaatcttatcccctaaagcccacatggcctggcttggaggacctaaaaacgaaacaggaaaagaatcctgactgtaacaccttggcctcatttctggcacatgtagttgccttgtattatagctatttatgtatttgtcttgtcctccccccacccctcacatatcaaggagatcataaattatggggactattatgctttgacttatctttgtaccatctgtaaaacctaatgtagtaagctttttgtgcagagtgagagctcaatatatataaatgtatgctgaattaaatttttgacaaatctagctataatgttatcattcttcatgatccaacttcaccagatcaataaagtcttcttttttaagtcaatatcctgaaataaggactttaaagttttaggattcaagtctgaaatagtatacgctctttggtcttaggggaacccaaaaaggagacatctttaaaaaggtttacaaaacataatcttcattgtttaaggtctctgagaccgagagaaaaatactttgagctatataacctctgtttttctctctggtataatgacagcagaaaagtcagaagaagtatctctcacttgtaggagtatcacctatatgcttaaatgcacaggtgctgattcatatttaagggcacactgccaaggcatcctgagtattcaattatcttcactatctaaaaacaggtcattttcccacatgctttcttaaggttagctgcaaagttttaaaaggtcagagttttagaaaccaaagccttctccatatctccatatctgacccagggacagaaaacaaaatcaagatgaagtgagataagcaaaaaatgaaaaaaaagaaagaaatgaagagggttactctgagagttagtaatagattgagggaaaaaaaaagagagagagagcccagcacatgttaaacagaaaatcagactatagagtaaaatgtgggcaaaattgacagaaagaaacagaaagacggacaatatgtcagaacagcttacccatgaaggcaatgccatttttcaagagaagttccggtagtttgggattctcagaagcatgaccccagccagcccacactgcctgcaagggaatacaatataattcattcttaaaattcatacaaaacccccacaaactgcaagagtctctatccaggctggccctgtttcttgaggtacagtagttccacagcagcctaatgcttaattcagcttctatgcttgattgttggcaaactctttacagagtaacaataagtagtccattgtggcaagatttctgaaggggtcaaaaccaagttgaaattgatattaagatccagttatacttgttgctctttaggaaactcaattcatagcctaggctgtaaagggcgttttctagaaaaactggctatgtttcacatattcaattactatggccactccattacatcattattgattacactgccatctaagtttagagttttttcctctttgggctttaaggtacctaccctaaacttactaacacaatgtgacagggaagaaacagcctacttctttaatataccaccatcctttaggctaatattccacaacaaacaggtaatttttactggctcaaaggtgagatacctagaataaataatctctgaaagatgcttccaaaccttctgtttgtattacgtttactttatttttagccattccattatttccatctttcttttccttatttggtttagttatcccatacacaggcatttaataattttcgaaaatgatgctttacaaaaatgttcttctctagatatccccttgtgcctaactataaaatggctgaatttggttttaaaggacacattggcatctcttacttgtactgggatccttttagcaatatcaagaattaattccacatttgcatagttgttgttgtttggtcctccaggcactggcacatagtgatctgccatcttaatgtattctgaaaatgcaagcgaattaatagagaacacatgatttttttttccagaaatataattgcacagcaaaactacgtaaaggtcagggactatcataagtaaccacaggacaaacagcattagtaggataatttccaggaccatttagttcgaggctcttagtttgttaagtcacaagcactaatacgagttaatcccatatttagaagctcttatagtaaaatagcaattctccaacatttcactatgtaatctttctgaggaatctttatgacttctatatcaaggctgatgtgtctgtcagttaggggcccaagtgcaattactctattccgagaaaaagttctagtcctgacatcctttgtctttaactggcactggacctagagaaagcccttttcctggtacagagcttgacagaatggagaaagataggagagcctgaatggcttgcaaactggctaaacaagaaaggttagttacaggagtgtctggaaagagtttatctggaatactgagggtaacaggtatttgtaagaaactttagaaagataaccactttctcatatatatttgttgtacagtattccctttcaaatttgtcacctaacatctctattttcctattctggcaatgacaactgtaacagaagagctaccacgtgtagggactgtaactagcactttgtatatatattatctcatttaattctctcatcaacccaatatgtgacagaaaatgatggcttggaggagttaagtaacttcctcaaagttcatttccaccatttataaatttattttagctttcaaatttcaactcaagcatccaccattatttactaataataaatttattttatcttgttcttttttaaaaatgtaagttccaggatacatgtgcaggacatccaggtttgttacataggtaaacgtgtgccatggtggtttgctgtacctatcaacccatcacctaggtattaagccccacatgcactggtaaaggacaggaacagacagacacttctcaaaagaagacatttatgcggccaacaaacatattttaaaaaaaacctcaacatcagtgatcattagagaaatgcaaatcaaaaccataatgagatatcatctcatgccagtcagaatggtgattatcttgttcttatttctaaaagattttaagtcccttctaaaaaaaattctactaaaaaaaattccgctagaatttcttcaaaattaaaataggcttattgttctctttgattataggaaggaaagcatgcaaattattaaacaatgttagataatacaacagaatataacaatactatattttaaaagtgaaaattggccaggcgcagtggctcacgcctgtaatcctagcattttgggaggctgaggtgggcggatcacgaggtcaggagatggagaccatcctggctaacatggtgaaaccccatctctactaaaaatacaaaaaattagccggggatggtggcacaagcctgtagtcccaccacagacagagtgaggctgagggaggctgaggcaggagaatcgcttgaacctgggaggcagaggttgcagtaagctgagatcacgccactgcaccaacctgggtgacagagcaagactccgtctaaaaaaaaaaaaaaaaattagctgggcctggtggtgggcacctgtaatcccagccactcgggaggctgaggcatgagagtcgcttgaacccaggaggcagaggttgcagtgagccgagattgcgccactgcactccagcctgggggacagagtgagactctcacctattgtcccacctcaaagacaaccagtttatgctttactgtacataaatatatatatttttggtatatatatgtttaatattttttatggatacctaatatttcaatagcctatataattcatttgactactaacttatcaatggaagtacagattatgtataatttgaaaaataataaaataatgtgtgtctctgtacggctgtccaattatatccacagatatgttactagcaataaaactattgggtcaaaaggtattcacattttcagactctcactagcaacatgggtaccaaatactctcacctatgttaggtattatcaatgtcttcaattttgtgagttttgtaagttaaaaaaaaatctttagtattgttttggtttagatttcttttttgtttgtttgtttgtttttgagaccagatctcactctgacacccagactggaatgcagtggcatggtcatggctcactgcgacctcgacctcccgggctaaagtgattctcccacctcagcctccggagtagctgagactaccggcatgcgcctctatgcccagctaatttttgcattttttgtagagacaatttcaccacatggtccaggctgaccttgaactcctgggttcaagtgatccgcctgccttggcctcccaaagtgctgagattacaggcgtaaaccaccatgcctggccctccatgctttttatcaataaggtataatctcttaatcttaaggtagagtatcttcacagataacatgaagaataatatggtatcaaggatttgcatcaaaataattgtgcacggggttaagaatatagatgaaactagattcgccataagttgataattattgatattgcatgacaggtagatgggaagggattcattatactcttcaacttttacatagttaacacacacacacacacacacacacacacacaccccaaaaaacacattcatttaaaatgcaaatccttagatgtccaacacacacacatactctccttaaaagacaaagtctgtgcttttgaggatggaaaacaaggtcccccttggcaaatactatatcacatcttgtagccatccgtaatttctagaaaaccacttgtgtcatacctttatgcatttgcaatgctgttctttctgtctggtacacctttctctccccccaattgcttcactaactcttactcattcttggttagacataatctctttcagaaagctgtctttctctcttttttttttttttttcattgagactgagtctcgctttgtggcccaggctggaatgcagtggcacgatctcagctcaccacaacctcctcctcctgggttcatgcgattctcctgcctcagcttccgagtagctggatttacgggcaccagcaccatgcccagctaatttttgtatttttagtagagatggggtttcatcatgttgaccaggctggtcccaaactcctgacctcaagtgatccacccgcttgagcatcccaaagtgctgggattacaggcatgagccaccacactcagcctaagaaagctttctcttaagcctgcccccaagaattagatgtctcatctctgtgttctcaccggaccctgtgcatgtttcttttatagcacttacctcattgtattgaaatcatttgtttcctagaacaagatcacatcttattcaactgtcaatctccatgttaagtgaatgaataaatgaattaattggagtaccaggtagaaatgaatgaggaaaaagaaaccggaccgggcgcagtggcttacacctgtaatcctagtactttgggaggccaaggcaggtggatcacaaggtcaagataccgagaccatcctggccaacatggtgaaaccctgtctctactaaaaatacaaaaattagctgggcatggtggcacacacctgtagtcccagctacttgggaggctgagacagaagaattgcatgaacccaggaggcggaggttgcagtgagctgagtttgcaccactgcactgcagcctggtgacacagcaagactccctctcaaaagaaaaaagaaaaaaaccacgcaagttaatctgtatttattatagatgatctcatctttacaattatccagtgaattagacattaggatcttccttttataagtatgaaacttgtggctcagagatgtgaaagtgtgcatctaaatgatttcatataataacatgatatagtttgaatgtatgtccctcaccaaatatcatattgaattgtaatccccagtctcggaaatggggcctggtaggaggtgtttggatcatgagggcagctccctcatgaatggcttgggccatctccttgatgatacgtgagttctcactctaagttcacatgagatctggttgtttaaaagtgtgtggcaccctccccacaattctctgtgttgttcctgctctggctatgtgatgtgcctactcccccttcatcttcccccagtaagtgtcctgaggcctccccagaagcagagcagatgccagcaccatgcttcctgtaaagcctgtagaattgtgagccaattaaacctcttttctttacaaattacgcagcctcaggtatttctttatagcaatgcaagaatgatctaatatataacatttgctttctaataaattggtgtcttctcaatttctaaataagatgatataataacctttctttcttaggaataatcataataccattgtctcaacaaagaaaaaacatatgcagactaaaataagtataaaaggatagctctttttcgcagcttcctaggagtaaaagataaaaaaaagtaaaaaaacatagctcttcacattatctgtgggtactctaccttaagagattataccttagtgatagaaggtatggagaagaaagactagtcatatctttcagctataccaacagtctttatctacaactatcagacagagaaccatctgagtaaaaagaatatgtagccgaatttacagagtgaaacacacttcggtcccaaaaggtctctccctcaggaagagaaaaaaaaaatcttaacccaaagtttttctataattcaatataacgcataaggaaaaaacagcatttccttctaaatctttccacttacgcattccaaagaatgtggcatagcaaatatttaacactgaaaaaggcatacacttgaaagcccaaatcaacacttttgttaaatttcttcctacttatccctaggacacaggaatctgtattgaggttgactatagtgcaatcatttttatatgtctattactgacacattttaaacagaaattattttaaaaggattttacttggaagtcctatgtttgggaatccccctaagttaacattctcctacttaaaggctgtgctgttccatgttttagttttgagagtgatgctttcataatgctaataactcacctgcattggctttaaggtcttcaggtgtgaccatgacaacgaatctaattgcacgttcatttcgaaacatttcataagaccacctacggatagaccgcatgcatttcactgctgcaatgccattgttagcaataagaacctgggagggggaaggagatgggaatgggaagaaaaggcagaaaaaagcaacaatggaggaaaagagatgagagaatttttacatatctatctttctgtgtaaaagtcatactttcaaccaagaattcttgttactggtccagactgttagaaactggcttccccaaggccaagcagtatctttaaatgttaactaagcaaatacttgagtatgtgccagctaaaacatactcctttctaacttcatttatttgaagggaaaagtcacaattacttaaatctgtgactttgtgaattattctaccatactaccatattgtgggtatggtatattatgaaatcaggaatgggggaaggccaaccagtgcagtgccatgcactcttctctgttgcaataaaatgaggtacagagcactgaacatgtttaaaaaccctggtattagttacttttctccaaaatactgaactccaataccttagaattgtagagaatgcctcagaaagaatggtcactgttgtagaaaaatagaataatcctgagactttctgtaaacaaacctttcgtctccttacctatcttgcagtcatgcctctaaggataacacagactaatagacacataatctgtctttattggaagactaataaaaggatgctgatgaagtaatacttttaggagtggaaatacaggtccccatcctttaatcttttaatcactggaagctatttcagccaagtcatcctctcagctctgacatggtttagacaaaagtgacacggaattacatttcaaaatacctggaatctctaagtatatcatgtggtatattcccttgaaacatctcaaatacttggtggaagccagtaagtcacagtgtatcaaactctttaagccttctcttctgaaactctctctactcccttagctttcaaaccagtgctgtggcatattatctccccaccagcacccacaagctaatcaattcttcataccctgtcagatcagtgcagccccaccctgtaaaaccacaagatctttcaaaaacatgttttgtttgagacagggtccctctgtcgcccacgttggagtgcagtggcacaatccatagctcactgcaaccttgaactcctgggctcaagtgatccttccattttagccccccaagttgctgggactcaaaaataactttatgagcactattttaactccttaattagctatgattaaattatctgtggtaaatacatattataggaaaacagtgaaattatattaataggatgctagggaggcagaaaggctaaaattcacataaagaggcaaagcctctgagaaactaaatatcaattgggagcaaatctagacaacaaatctaggcaagcattaaatcctaagtgcttttgacaaaataattcagcaagttacaacttaccttctcaatcactttatttcccccaaagcgagtaacaaattctgctggagaagccacagtgaaatctcgttgagaatctattttctttctgtctcggccctgctttactaggtgcaagccagacatgctggacctataaaaatacagaagccataaaaacaccacctatattttctggagacctgcttttcactaccatacccataacagtactttcacaactgcatcctgtgaagactgcatgctggcaggtcacgtacttttcaaataaaagagagaaaagaaaatgatcttgcttgtggaaatttaaggaaaaaaaagcgtttctgaataataaaagataatatcaaggtttaccagcagatgccatcacaaagagataggcaaaggataaatggtagaaataatagactcagagaccgttaaagccaaaaaacaagttaccagggttgtttctggatcacgactctggtgtgcagatgaccttcacctctgtatctctgacttctatctttcttctgagctataactccacattttaaaactgcctactaaatgttttacctgggtatctcctaggtatttcaaaatcaacaactccaaaacaaaattctttacaaggcagcataatatgccatatttaatcagttttaaggttctacttcttttctttttactttaaaaaaatctcctaggccgggtgcagtggctcatgcctgtaatcccagcactttgggaggctgagatgagaggatggcttgagaccaggaattcgagaccagcctaggcaacatggcaaaaccctgtctataaaaaaaatacaaaaattagctggcacagtcgtgtgttcctgcagccccagttacttggggtggggggtggggggcgcagctgaggcagataaattgcttgggcacgtgtggttgaggctgcagtaagtcatagtcatgctactgcactctagcctgggtaacagaatgagatgggtgtctcaaaaaaaaaatctgaaattggtatgtattttacaattgatgccttattaaattggcagtactgtttttgttgttgttttgagccagagtctcactctgtcgcccaggttggaatgcactggccagatctcaactcactacaaccttcgactcccaggttcaagcgatgctcctgcctcagcctgcagagtagctgagactgtaggcgcgccaccacacctggctaatttttgtatttttagtagagacaaggtttcgccatgttgaccaggctggtctcgaactcctgacctcaggtgatccgcccacctcggccttccaaagtgttgtgattacaggcatgagccaccgcgcctggctggcagtactgtattttttcttagtggtacataaaataacagtgtttctaacaatcaatggcaccttggattagacaaaatatgatagtggaaacagcacaggcctgggtttacattccagatctgtccacttaaatgatcttttgcaaataatttaaccttttcagcttcagtgttctctttgtaaaatatgcatgatatttactgtcctggttatttacctattgtctctcagctccaaacctacccttttatgctgtgctctgtgacaatggggccaagattctgcaaacttcatttccaagactcctttgctagctccttcctgttctgttcaccaaaccggaaggcagaaaggtaagaaaagggccttccttcctatttcccagctgttatcagtattgctccagctgtaacagagacttaattccagtctctagcttctttcaacagtctggtgaaaagccatagaggtaccagcagcagtgggttgtggctctttggcagtcagaatatcaaccttgccatgctcactcatcctctggacctcactgcctgggcctatcaatcacctgtcaggccaaggatctgagtaccagctacccaaagcttatgcccagaggtccaggcaccagccctccaggagacctccaccaagctcctagttctggtaacactacctccccttttgttctcccagacttagaggtgatagctacttcctctagttattaactctggggtacctcagcatgccttttttgttgttgttcttttattcttctaacacccaattatgcaattctcgctattgaatgttctctgtttataacacctactacaatttattttccttgtgactgcaccttgactgatagaccctccaaaagagtgttcagaggattaaataagatagtggacataagctcctttgtacaccgtttgatagacagctgttttcttttcctattcccaccttttcttcctttcccctacaatttaaacttgatggggcagtaaggtgtcttttcaaaataagaaggtatgattaaaatcttcccacatgcagcacaatatctagctttctgtgcacatatagttttacatatacatacataaataagaccagtctttctttcttctctgagtgtctctatgcataaaactcaatgagtgggcattttccctatacttcacatgacttagtgtggctcttaacttgcaaaaccaccacctacgggagtataacaagaagggacaaggccaggcatggtggctcacacctgtaatcccagcactttgggaggccaaggcaggcggatcacttgaggccaggagttctagaccagcttggccaacatggcgaaaccacgtctctactaaaaaaaaaaaaaaaaaaaaacaaatatccaggcatggtggtgcacgtctgtaatcccagctactcaggaggctgaggtgggagaatcacttgaacccagggggcggaggttgcagtgagcagagatcaagccactgccctccagcctgggcgacagagcgagactctgtctcaaaaacaaaaagacaaaaaaaaaaaaacaagaagggacagttcagagtctagcagctactttgcctactagacttaaggacagacataacaaaggctatgcactctgctgttggcactcaatataaaatgctctgtacccttcttagagactgacatttcaagctggtcaatctattaaaattttcttcatccttttctatccaggtatttagttatactgcatctggactggaactttaaagttaagaggcaccttatagaaaaagaggcccacaaggagaatgatttgtctaaggtcacaaaggaagtctgtagcatatatagaccagaaaaccaggtttcatggtcatttcaatgttcttccaattacactatgcaacatatctaatgataataaacaccagaggtctaaaaacagtgccagtgtacatgttttgtttcatttttttaatcacttcatttttctttcatacattctttttaatttttttattattgcatgtatttttaaataaataaaaattaccttcctgtccttaactttgtcatgaacctatttcttttgggccccaagtccatggatcattatcagtgtatcagactgagcaataacatgaatgaatctcaaaaacctcatgttcagagaaggaaaccagacacaaaaaagtatataccatatgactccatttatatgacaaggataactaatctacagtgcagaacacgaatcagtgggctggggctgtgggaaccgactgcaagggagtatgggaatgatggaaacgttctatatcttgatctcatagtaatggttacatgggtagatatatgtgttaaaaccatcaaactacataattttaaaaggtgaacttggcctggtacattggttcacacgtgtaaacccagcactctgggagggcaaggcagaaggattgcttgagcccaggagttcaagaccagcctgggcaacatagaaagagctcatctatacaaaaaaatcaaaaaattagccggccttggtggcacacgcctatagtcccagctacttaggaggctgaggtgggagaatcacttgagccaggaagactaggctgcagtaagctatgatcacaccactgcactccagcctaggtgacagagtgagatcctgcccccgctccaccaaaaaaaaagggtaaactttactgtacttaaattatacctcaacaaacctgacttttgaaaatactcatttacctgccaggcatggtggctcccgcctgtaatcccagcactttgggaggctgaggcggatggatcacttgaggtcaggagttcgagaccagcctaaccaatatggtgaaaccccgtctctactaaaattacaaaaattagccagacgtggtggcaggcgcctgtagtcccagctacttgggaggctgagcaggagaatcgcttgaacccaggagacagaggttgcagtgagccaagatcacgccactgcactctagcctgggtgacagagttagactccatctcaaaaaaaaaacaaaaaacaaaaaaatcatttaactgtccacataaaacaggtatatctggctgtaaattattcctcagtaaagttggcttttaaagaactgttactaatggtattgaaaggtaacacagagaataaggctaaggaagtacccacaccttgaaaatcagcaactgtaagtatggcacaatcaaacatttcttcatctgtcctcattatcttcaaccctctaggcacctccacttcatatcccacgagtatttcaaagtctgaggatacaaaaatgtcaatcaaaatgcaaactaggactgatcttcttaggaacttccatttttccattaccccatatacatttagatacctaaccaataccatgtgctctccggcagtaatataatctactctattacagcttggctttctcaacaacaggaatccaccactgcattatagtatttttgtcagtactactccaattcattcttcaaaatgcaactaaactgtcagtgctcccagtgagcctttgctgatggggatccttccaacttcaccccttaaggaggtaggtaactgagcttcctctgtgccacaccagaacatgcacttacatctttcctcccaatcacactggactgttacatgagcttaacacatctgttttccctgataaatagtgtgtgttccttgaggtcagatactcttattcatcccttgaggtcagagattcttatttattgctgtatctccagcaccaaagggtacctggcacagatagaagctgttcaaacatctttgggttttttttttagacagagtctcactctgtcacccaggctggagtgcagtggtccaatctcggcttattgcaacctccgcctcccaggttcaagcgattcttgtgcctcagcctcccaagtagctggaattacaggcatgtgccaccacgctcgactaattttttctatttttagcacagacggggtttcaccatgttggccaggctggtctcaacttcctggtctcaagtgatctgcctgcctcagccttccaaaatgctgggattacaagtgtgagccaccatacctagcctgctcaaacatttttgaatggtgattattatttattaattattgacaactacacaaaataacactatttctgagtactcgctatgggacagacactatgctaagctcttcacatgcactggcatattaatcctcgcaataatgctatgatgtttgagcaccattttacaagtgaggctcagagggattaggtaacttgcccatgatcattcacacagccagaagtaacaaaacagatctgaattcaacctttctgactctaagtccttgaacttgataccctacaatactgcctcaagttaacctgcactgaatatagtcacagttaattattcactgtatatccatgtaaataattatgtttttagagcaggggtatccaatctttttgcttccctgggccacactggaagaagaagaattgtcttgggccacgtataaaatacgctaacactggcgggcacagtggctcttgcctgaattccagcactttgggaggctgaggtaggtggaccacgaggtcaagatatcaaggccatcctggccaacaaggtgaaaccccatctctaataaaaatacaaaaaattagtcgggcgtggtggcgtgtgcctgtagtcccagctacttgggaagctgaggcaggagaatcacttgaacctgggaggtagaggttgcagtgagccgagatcacgccactacactccagcctggcaacagagcaagactctgtctcaaaaaaaaaaaaaaaaagaaaaagaaacacactaacactaatgatagctgatgaaaaacacatacacacacacacacacacacacacatctcataatatttgtttttgttttgagatggagtttcgctcttgttgcccaggctggagtacaatggtgcaatctcagctcaccgcaacctccacctcctgggttcaagcgattctcctgcctcagccttcccgagtagctgggattacaggcatgcgccaccatgcccggctaattttgtgtttttagtagagatggggtttctctatgttggtcaggctggtctcgagctcccaacctcaggtgatccacccgcctcagcctcccaaagtgctggaattacaggtgtgagccaccgcacctggtcaaaaatctcataatattttaagcaagtttatgaatttgtgttgggcctcatccaaagctgtgttgggcctcatccaaagctgtcctgggctacatgcagtccatgggcagtgatttggacgagcttactttagagcaaataccaggtgatgtttctttaaaacagtttttggagaacaaatttcttagatctttgctgcccatgtcttccaatgtttacatataagccccaaatacatgccagtcatactaaccattacaaatctcaattctctcaagaactgaaagaacacctgatgatgttattaaataaatgactgatacgattatactaatctgagatgacatatactaaataaatgtagtcttatagttatcaaaaaattaagataaaattaaacatgaaggaaagggcaagagtaaaaggcagtgccttttaggagaattttttttttcattgaaactgtaaaaatgtgaagatactagaatgttaatttgactgctctaagaagtaattttttaactttgcacaaaacatagtatgaatgtcatatattcaattaaaaatgtgcttatgcatctagtaagcaaagctgaactacccttgcggaaatgtgttacctgttcaatggcctaagggataataggtaattttaaagagggtgatacgagcatttgtagagctctatataactgtataacatcatgtaaatttgtatgattttgttttgtgaatatagtttcaacttgctaagtaaagcagtaaggggcaaacactaaacttaccagttaaaaagcattaaacagttagactttgtaatgatagtctttcaaggtttacccttgctgccattatgctgctatgaaattctcaaagcatcttgagaaaaacaagctttgattccccttggaactttctaaacagggcaaagtatataaagtcctctcaagggaaagccagaagttaacaaaaaaaaggcattctataagcaagttaaaagaaagatcagactttaaacataagcatttttctgtgcatcatcctgaaagatttcaaaatgaaaagaagagaataaaaaaggataaagagtttaagaaaggccaggtgcggtggctcacatctgtaatcccagcacttcgggaggccaaggtgagaggatggcttgaggccaggaattcaaggccagccttgccaacatggcaaaaccacatctctacttaaaaaaaacaaaaacaaaaattagctgggcgtggtggtgtgtgcctgtagtcccagctacctgggaagctgagacaggagaatcgcttgaatctgggaggcagaggttgcagtgagctgagagcgcaccactgcactccagcctaggcaacagagcaagacttagtctcaaaaaaaaagaaattgactctaggcaaatgaccaataagtacttcagtgccggcactacccgtgcaaaacaggaaacaaagtgtgaagcaatgcaagcacatatgtgaaatttggctccacactaaatccggcttcatgcttaactatatattaaaaaaactggcaaactgccgacacatttttttttacaatacttatttttactttaatcaagactaagaactttaactatgaaaatgttaattagccaaatttctccagttctctatcaggttttaagcaatattttattatctaaacttttccacgtctttctcccctccttaccggttccttactacattgtttcataaataaccttttcaaatctgtaatttgaactaacttttagaaaacttccgaattagacaaaattattattttttctcactaatcacacaacactttctggcacattttgtatatagaattatgtgttaactagaattcttatccttagtaacctaaaacttcaatgaaacccgaaaaagcaagaaatcctgaaccatcagagataaaagcattatagataagaacaattccacaatttgtagaaacatatttccccatgtcacaaccttttcttaattggaactgacccagatattcaatgagcatcaaaaataattttaggactttttttttttttttttttttgtgacagagtcttgctctgtcccccaggctggagtgtagtggtgtaatctcaactcactgtaacctcctcttcccaggttcaagcaattctccagcctcagccccccagtagctgggattacaggcacacaccaccatgcccagctagtttttatattttcagtagagatggggtttcgccactggccaggctggtctcgaactcctgacctcgggtgatccaccctccttggccttccaaagtgctgggattataggcatgagccaccacgcctggccaagattttaatttacacaaaaagattacctaaaacatttatcccattcactgtactcaattctttcatgtttaacggtttatttagataacttctataaacagagatatcagacactatcatttaaagttagttatttccttgctaaccatgtttttaatagccagcgaacataaggtgctcacctaaacctaagtaacagccttaaaggtaaatacactggtatttttttttgccaataactcagaagacttagttaacaacattaagttactctcattcgttgaaaaaaaaaaaggcacacaaaccaagatcattttgtatgggctaagttagtagttttataaccttctatgccaaacattgacatctcaaaatatttagcagagacaaatataaaatccagacaaagaatgtattctgacaattctgaaggcatttctagttttattttactaataattttaaagccagcttgtttagtaaagttatacttaagtcacgtgaacttgaaaattgcttagacttatttacttaatttttaagtgctcttttatttataagccaatttggtagacacaacatgtaacaataagtgtgcatacaaataaacacatctagacatgtatagacgcacacaaacgaagattcaatcgcttttaactgggaatcttaaggcatgagatagcaatacaagcttggggggttttcctttgtttgccccaacagataatccaatgaaggctgtgaaccaaaatttcagatatagcagtttccacagcagtttgacacatgcaactccatcccactttcccattcaacagcaagctccagattccaaacaatattgggccaaacagtattgcaactgcgagagaaaattctaaggagggcttaatactagacctcagaactctgcctagggtgtcccctttggagaagttgaggtctggaggatccctgggccgtccccctttggggtccagtctcagagtgtcagacgtctctgaccttaggtgggcactggtgctgcttagcatgttttcccttcagaggcaatggcctactatgaggtttccttttgtccctggatgaaggcctggacttctggcatccttataatttgataaggccacactttcccatgcttcctgttccactagagtgatagccatgaactgtaatgataggaactggaggctgggtgggtttcttttgtccttagccagtagagtaggggaagggaagaatttagcatgagaaaacaaggtttaagtcactgaaacaaatgccagctcgccccaagctgtgccacacgtagggatcagggaccacaactggaaaagatagaaaggagtccttcagagtggccccggccagaaacctgcagttgcctctgtgtttaggtgctgcccaccaaccgtcccaagttggaaaggaaaagagagagagagactgagattcccctgtatggagcaggaaaaacaaacaagaaaaataaaccccaaactttgggattacctcctggctggcttgccaaaatatgttaccagtggaggctgtacaagttcttggtgttttgaacaaagaattgaacaaaacacacaaacaaagcagggaaagaataaagcaacaaaagcagagacttaactgaaaatgaaagcacacggccaggcacagtggctcatgtctgtaattccagcactttgggaggtaaatgtggggggataacatgaggtcaggagttcgagaccagcctagccaacatgttgaaacgttgtctctactaaaaatacaaaaattaggccaggcacggtggctcacacctgtaatcccaacacattgggaggctgaggcgggtggatcacgaggtcaggagatcaagaccatcctggctaacacagtgaaaccccatctctactaaaaaatacaaaaaattagctgggcgtggtggtgggcacctatagtcccagctactcgggaggctgaggcatgagaattgcttgaacccgggaggcaaaggtttcaatgagccaagatcgcaccactgcactccagcctgggctaaagggcgagactccatttcaaaaaatcaaaaaattaaaataaaaaataaaaaaaagaaaatgaaagcacactctacaggttgggagctggcccaagcaagccagccactcaagggtctggttacagaattttctggggtttaaataccctctagagatttccattgttacttggtatacaccctgtgtaaataaagatgatgaagttacaaagtcatttattcagtgtatatcctatgtaaaggaagaggatgcttcctgtcataactgaagtgcttgtttccatttgatttagttctagaaagttcttgggttccctgcctccaggtcctactcgcttgcatgattctcattgtgtcctcacagagtggaaggggaaaggcagatctttggagccttttttttttttttttttttttgagacagagtctcgctctctctcccagtctggagtgcagtggtgagatctcggctcactgcaagctctgcctcctgggttcacaccattctcctccctcagcctccagagtagctgggactagaggcgcccgccaccacgcccggctaattttttgtatttttagtagagatggggtttcaccatgttagccaggatggtctcgatctcctgacctcatgatccgcctgcctcggcctcccaaagtgctgggattacaggcatgagccaccatgcctcgcctggagcctattttataagggcactaatcccattcatgagggctctgccccatgatctactcaactcccaaaggccccacttcttgacatagtggtaattagatttcaacatatacattttgtgtgtgtgtgaggcagagtctcgctctgtagcccaggctggagtacagtagcacaatgtcaggtcactgcaacctccatctcccaggttcaagcaattctcgtgcctcaaccacctgagtagctgggattacaggatcctaccaccacacccggctaatttttgtatttttagtagagatggagtttcgccatgttgcccaggctggtctcgaactcctggcctcaggtgatctgcccgcctcggcctcccaaagtgctgaggttacagacatgagccaccgtgcccagcctcaacatataaattttggcaaagacacattcagacactatatatcaatatatacttatagagatatatatgcacgttttatttctatatgtatagccatgaggtttttatataaaaactatgttatatataaaacacatttaaggccgggcgcggtggctcacgcctgtaatcccagcactttgagaggccaaggcgggcatatcacctgaggtcgagagttcgagaccagtctgaccaacatggagaaaccccatctctactaaaaatacaaaattagcggggcatagtggtgcatgcctgtaatcccagctactcgggaggctgaggcaggggaatcgcttgaacccgggaggcagaggttgtggtgagccaagatcgcgccatcacactctagcatgggcgacaaaagtgaaactctgtctcgaaagaaaaaaaaaaaaaaccacacacacatgcgtgtgtgtacatatatatgtatatatgtgcgtgtgtttgtgtatgtatatgtgtgtgtatatatatatatatacactttttttttgagatggagtttcgctcttgtcacccagactggagtgtgatggcgtgatctctgctcactgcaaattctgcctcctgggtttgctcgatcaagcaattctcctgccttggcctcccaagtagatgagactacaggtgcctgccaccacgcccagctaatttttgtatttttagtagagacggggtttcaccatgttggccaggctggtctcgtactcgtgacctcaggtgatccacccgccttggcctcgcaaagtactgggattacaggcataagccaccaccgtgcccagcctatatatacatttttgaaatatatatttatacatgtatatacataaaaaattttgatactatattatatatatacacaaacatagattatatatatctcagttactttggaaaaaaaatttttagagatgggttctcactgttgaccaggctgcagtgcagtggcaggaatatatctccctgcaacctcaaactgctgggctcaagcaatcctctggcctcagcctacagagtagctggtactacaggctcatgccactgcactcagctatattgtagttacttttatacctctttgcctctcagtggaagttttgcttggttatcccctcaaagggtggaagaagtggtaaaaaagaaaaaggggcaattacagaggcagttgggggaaaaaaaggaatggaaaaggatgatctaaagacagattttgccaactcagtgttttttgtttattttctgtctttgcctaagtttagtttaactttcagtaattttcttcaaaataaaaactctacattataaaaacaagcaaacaaaaaagataatggagggatgccaggcacagtggcctgtaataccaacacttctggaggccaaagtggcagaattgcttgagtataggagtttgagactagcctgggcaacacagtgagaccccatctctacaaaaaacttgaaaaaaaaattagccaggcatgatggtgcatgcctgtagtcccagctacccaggaggctgaggtgggaggatcacttgagcccaagagttcaaggctactgtgagctatgaccgcgccactgcacaagcaaatcattcaagtcttttatgtcaattctctgcagggaggtgcagacctgcaagaggcctgaagaaggcccaagaaggcctgactcatttcctcctcagcctgagttctaatggcaataagaaaggtcccaaagtgaaggagttcggcatcctgaacaactctgtctgactacataccacaattacagcaggcacctttcctagccccagacacacattctaaaaaagttttctgcaaaactatacaatatctttcctttacagcagttgaagagacttcactggaaatactagccaaatccagggagtaaatctgatacatctgaggttcccttcaggaaataatagcacagcagggtctgcatggggtgcttgttttcaacgtagctaaaatatcacacatgggctcagggatcttttattcaaattcccaatataaaataaaggtttagacattcaggagccaatatgcccatttttattcattttcttaaaaaaaatagccttcattttttaaagatagaaaaaaaatgatcaaataaatctcagggcttagctgtcagtaccttactgtttttttaaagatatatatattacccaaatgtggtagcctaacacttacctttgaagcatgtaatatctcatttccttattttcctctggagaaccctccatatcaagatgggaaaagaatggaagctttttcttcagatttcggccttgtaaacacaagccgcagttcctcctcctgttgcagctgcttaaaacccaggaggacaagagatactgtgccttctgcctggcttcagtcagactagaatactcctgatggcctcaaactatagtctttttgtctaattgttcccaatttccttctttccccacctttctcttcctttttgcatcttctctcctccacacacttagcttacacacacaattagttgatttcccaagggaactgagaggagccggggagaaatataaaagcttgtttaactagaaagtagatcttagcagctctcctttagttgcagcaaacattttcaacaacagtcactttcttctgacagtcaacggagaaaagctccactgcctctcctggctgccaggagcacatgacagggaaagcccaggacaaaaagaccaaatttacaaggacaattaagccaagaaaataatgggctcatgaaatccagagggaggagcacagctcggtctaaagaggtaatttctgagatccaatcaaaacaaataataccaattatcagactgcacggtggggaaaagcaggtcaggtgggaaagtaagcacgtagaaaggaaacacgccactactagggaacttagaatcaagtgtgagccacgattctaattttcaggccaaagtagtggtatatatagacacctaaactaaggttttatgcaccaaagcttgagaataggaatggagctggtacaaaacggatacagaaaagattgtgggttaaacccttaaaaggaaaagagaccctgacaaatattttggaggtctaacccccttaagcagggaagaaaaatcctgcctagaaagactacttactgagacacatatattactatgaaagcaaatttgccacagacagatctcttaaagaaataaacactagctgaatgttatcttgtaatatcttcctgtttttagcttttacttaagtagatgctcatgatattctgtgtattaggagaaaaatcaatggcaaaagaccctaaaggcttagaatctatagaaagacaacttcctgaggcaagtcctcaggactgtacaccaaatctaacctgaatcatgaaccataaaaaatttattcccatcaaaatgctggatagaaatagttaacaatctgatgccaaccacgctgagaatatattaagcttccagaaaaaccttcaaaaacagaagtacacaaatgacctggagcatagatagaagttaaataatcagataaaagataaatgattacaacaaacaaacattgatctgaaggacattcgggcaacttaagttgtaaagactcaagttgcccaaatttgaaagcaactcaatcaggccacccaacatgacaaccagctataataaaaaatggaagtcctggttgttctctggtctgtacttcacatcatcccttccacaatgtgccaatgcccattaagttagtcaagtttactttccctttaaagaaccaagctgacacagaggagcccttctatctttacgtctcttcagaataacctgtctcaaaaatagagcactgcagcctttgttcaggaaagttcagtagccacagatgagaagctgctcaattttacacacacttaagtgtctacaaaacaaacttgttatacaagttcaccattcaaaaatgcaaataaagcactaagtgtaaaaataaggcagactattttgcactcaactatatcagaaaaatatactaaagaggcacactcaataatcgagtttatgcttcctttcaccaaacggatctttctacgacaaccaaacactaacacagcatacccaggtccaaaagcaaagctagagatctatatagatcttttatagacactgctgctcacaatctttctctaatattagaatacaagaaataaaaagccacattcatttctccaaatttaaagcatcccccttttaatctaccatgaacagtgtccaacgtagacacatacctggcacaaaatccaactagaagcccacactgatcccagcattgtaacatgccaaacaccaaggatgacgtagcagtttacccggcagacagtgatgcattcgctagcttgactgcaacacagtctgagttatactgcagcacacacactgtgagagactgttttacattgggtttttacaagcagagaaatcttggatcaaggatgtgtctctgtcaaaaaatcaagtgaccatatatttaaaggtttctttgtggactctaaattctgatccattgacctatatgcctagccttgaagcaatgccacatggtcttgataactgtgactttatagtaggttttgaaatcaggtagtatgaagacctccaacttcacattcccttttcaaaagtgttttggctattctaggtcctttgtttccatgtaaattttaggatcggcttgtcaaattctagaaagaaaaagaaaggctgctggaaatttgatatggactgtgaatttatgatcaatttaaggagaactgctgtcttgacaatattgagtcctctaatccatgaacatggactgcctctccatttatttagattttatttaatttcttttttttttcttttttgagatggagtctcgctctgtctcccaggctggagtgcagtggcacgatctccacttacaacctctgccatctgggttcaagcgattctcctgcctcagcctcccaagtagctggaactaaaagaacaccaccacgcccagctaattttttgtatttttattagagacagggtttcaccatgttggacaggctggtctggaactctttttttttttttttttgagacagggtttcgctcttgtgacccaggctggagtgcaatggcgcgatctcggctcactgcaatctgcaacctccacctcccgggttcaagcgattctcccgcctcagcctcccgagtagctgggattacaggtgactgccaccatgccaggctaatatttgtatttttagtagagatggggtttaaccatgttggccagactggtctcgaactcctgacctcaggtgatccacccacctcagcctcccaaagtgctgggattacaggcgtgagccaccacacccggccggtctggaactcttgacctcaggtgatccatccgcctcagcctctgggtttgggattacaggcgtgagccaccacccctggctgattttatttaatttctgtcagcaatgttccacaagttttagtgtataagtcttataccttttttgctcaatttattcctattttattctttttaatgctatcatgaacagaatattttcttaatttcatttttggattgttcatttctagctagcatatagaaatatacttaacttttctatatagatcttacaccctgtgatcttgataaactcatttaaaaattttttgttaacaattttactgagatacaattcacacaccatacatttcacccacttaaagggtacaattcaatagtttttagtatattcacatagttatgaactatcatcacaataaatttaaggacattttcatttcattatatgtgtcatttttttaaagagacgaggtcttgctatgttgcacaggctggacttaaactcctaggctcaagcaatcctcctgcctcagcctcccaagtagctgggactacaggaacgtgcaccacgcatggcaattttagaacatttttattacctccaaaagaaaccccatgcccagtagcagccactcctcatttctccaatatgctccccaatcctagccaaccactaatctactttctgtctttatagatttgcctattacagacatttcatataaatggaataatataatatgtggccttttgtgactggcttctttcatttagcataatgttttcaatgctgtagcatatatcagtacttcatttctttttatggttgaacaatatttcaatgtgtggacacaccatattttgtttatacatcatcagttaatggatattgggttgtttccattttgtggctcttattaataatgttatgaacattcatgtataaacttttatgtggacatatgctttcctttctcttgggtatacaataaggagtgaagctgccagatcatatggttcatatggtgagagtttagttttataagaaagtgtcaaattagccgggcacagtggctcacgcctataatcctagcactttgggaggccgaggcaagtggatcacttgagatcaggagttcaagaccggcctggcccacatggtgaaaccccatctctactaaaaatacaaaaattacctgggcatggtggcaggcacctgtaataccagctactcaggaggctgaggcaggagaatcgcatgaacccaggaggcggaggttgcagtgagccaagatcgcgccattgcattccagcctgggcaacagagcgagactccgtctcaaaaaaaagaaagtgtcaaattattttccagagtggctgtatcattttacattcccaccagcaatgtacaagaaatccaatttttctgcattctcacaaacctttggtattgtgtctatttcttattttaggcattctgataagtgtgtaatgatatctcattgctattttaatttgcattttcctaatactaattaatatttgcattttcctaatacctaataactattagataattataaaacatcttttcatgtgtttatttgccataggtatatcctctttggtttcatttgcttctttttaaaaatcatttctcttttcttattgagaatttctatttattttatttttaattttttgagacagagtcttgctcttttgcccaggctggaatgcagtggtgcaaacactcaatatgctcaagcgatcctcctgcctcagcctcccaagtagctgggaccacagacatatgctgccatgctcaaataattttaaaatttttgtagatggagtctcaaattcctgggctcaggaaatccaccccgcttgcctcccaaaagcactgggattacaagcatgagccactgcactcagctgagaagttctatttattgattcattgttgtcatgcttaaaaaaacagtatttaaggggccaggcgcggtggctcatgcctataatcccagcactttggaaggtagaggcgggcaataacctgaggtcaggagttcgagaccagcctgaccaacgtggagaaaccccatctctactaaaaatacaaaattagctgggcgtggtggtgcacgcctgtaccagctactcgggaggctgaggcaggagaattgcttgaacccgggaggcagaggttgcggtgaccaagatcgtgccattgcactccagcctgggcaacaagagcgaaactctgtctcaaaaaaaaaaaaaatagtatttaagatggggcacagtggctcacacctgtaattccagagatttgggaggccaaggcaagaaggtcacttgaggccaggagttcgaaaccagcctgggcaacatggtaagactctgtccctataaaatataaaaataaaaataaataaatatgtttttaaaaattatttaaacatgttttcctttaggtctttgaacacatttacagtcgctactttgaaatctttgttaaatccagtatctagggacacttgtagataatttctgttgacttttttcctaaacatgggtcacattttcctgtatctttacatgtctcacggctttttaattaaaaattgaatataacctgtcatgggattagaaaacaaattatgcatatgaacaatttacaaattgaacatatgaacaatttggattctgatttctttcacccatgaaaattgttgttactagtttgtttttttctttcttggcttaatcatttgcctgagctaaatctgtgaattctgtttccctaacagtgtgcagccactgatgtctcagctcattttctttttatttcttggttttatgtttaaatgtggcttttgaggagtcacccctatgtctgtgtagccaatgattagatagagtttatgctcatatacttaaagctagaaaggcttttatcctctgtttatgggtctggagtatgggggatatagagtagtgcattcaaagttcaggtttttcaagtctgccctagctgttactttccgttgggccttatcatgtctcttctgtgcatgtacatgcctcagcctgcaatatgcttgccccaaccacaaacaggcaaagtcactggcctgtgccactcacccactgccaagtggtcacttctcccaacaatgccattgagcatggacatcatccaccacccaaactgagtaaactcccttgaaccacagcatcaaagcagctggtcttcatggtctacccacactggtaaaactttcatgacaaatcagctggggaaaggggaataggaacaatcccagacaagaataccacaaactcctactgttttacggaattttagcagtttttttttttgttttttttttttttttttttttgagacggagtcttgttctgtcgcccgggctggagtgcagtggcactatctcggctcactgcaagctccgcctcctgggttcacaccattctcctgcctcagcctcccgagcagccgggactacaggtgcccgccaccatgcccggctaattttttgtatttttagtagagaaggggtttcaccgtgttagccaggatggtctcaatctcctgaccttgtgatccgcccacctcggcctcccaaagtgctgggattacaggcgtgagccactgcacccggccagcagttttttaatcataaaattctctcaaattattgtatgccttttggttgatttcaagagtgttaaaatggttaattttgtcaagtttgtcaatcttcataattggtttttgtgttgaagatctgccagtctcctcattcagctatacctggaagtcctccctgttttatttactttttaatgaccgatataacttcatacaatgaagtggaaaaatcttaagtataaaacatatatatgcaaaattaatatatatatagccatataaccaatcacctcattaagatacagaatatttccagagtcccagaaggcttacttgtgtcccttcctagtcaatattctcccttaaaggtaaagactactctgaccttttataaccattgatcagtcttgtttactcttgaacttcataaatatagtgttatataatgtatgtactttaatgtctgacttcttttgatcaatattatgtgtataaatttattattatttttttttttgcaatggagtcttgctctgtcacccaggctggagtgcagtggtgcaccctcggctcactgcaacctctgcctcctgggatcaagggattctcctgcctcagccttccaagtagctgggattagaggtaagcaccaccacacccaggtaattttttttgtatttttactagagatgaggtttcaccattttggccaggctggtcttgaactcctggcctcaactgatcctcccacctcagcctctcaaagtgctgggattacaggcgtgagccaccacgcctggccttatgtgtataaaatttatctatgcttaccacttggtcgaatttatggaaaaaaaaattcacccatgttgtgatacagcagtagtttgttcattttcatttctgtatggtattccatcatatgatataccatgatttacttacctattctactattcacggacatttgggttgtttatgaattttgacaatatttgcttatttctgatggataaatgaactaatttcctctgggaatatacactaaaatgaaattgctcactagtgaggtatgtgcatgtttagctttaaatgatactgctaaatagttttctaaagtggctgtaccaattcatattaataccagtgatgtgtaagagtcagtgtgttccacttccttgctaacacttgatattgctcgttttttaattttaccttttttggttgggctatgtgtttaactcattgtaattttaatttgcaaatccctgatgactagtaatattgagcaccttttcatatacttacttgacatttggtatcttcttttgaagtgcctgttgaagtcttttccccatatttctattgtgttgaatgtcttttttcttattgttttgttttgttttgctttgtttttgagacagagtctcgctctatccctcaggctggagtgcaatctcagctcactgcaacctccacctcctaggttcaagtggttctcgtgcctcagcctcccaagcagctgatactaaaggcgtgtggcaccatgcctggctaattttttatatttttagtagagatggggtttcataatgttgtccaagctggcctcaaactcctgagctcaggcaatccatccaccttggcctcccaaggtggtaagattataggtgtgagccactgtgcccagtcataagatccttatagtaggatattttaatattcttcttcagcaactgatataacaagtagaaaaaaaaaaatcaaagacacagaagaacaacaaactgaaaaactgaacatacatagaacctataatcaccaactgcaacatatacattcattgcaagtgtttatgaaactttatcaaaatagaccatatactaagccataaagtatcaataaatttcaaaggtctgaaatcacatagcgtatatgctctgaacacaatggattacactaaaaatcaataacaaaggtaataaaatccacaagtgtcttgatatatttctaaacaatttatgagtcaaaaaatcacaaggaaattaagaaaatattttaattgaataataatgaaaatgtatatccaagcttgaggaatataataagacgaatttatgagtgaatacagagatgaagagatggatatcaacaaagccagaagttaattctttgaaaaggaactgaattgataaatttctactaagactgataaaaataaaagaaaaaaatgctaattgccaatatcaggaatgaggacaagggaatcactataaatcctatagacatgaaaaacaagcatattattacaaactttatgccaataaatttgaaatgttagaaaaaaattgataaatttcttaacgactttccattccacccagaaagacatgaaaatctgaataatcctaaatctactacagaaatcaaatacataatatgtataatttaaaaactactagccaggtgtggtgactcacgcctgtaatcccagcacgttggaaggccaaggcaggtggatcatttgaggtcaggagtttgagatcagcctgggtaatatggtgaaacactgcctctactaaaaatacaaaaattagctggcttagtggtgcacgcctgtaatcctagctactcgggagactgaggcacaagaactgcttgaacctgagaggcggaggttgcagtgagccaagattgcgctactgccctcaaataaaataaaataaaaatgaaaatggaaaaacaaaaactactactattatcttttgtgactgttcccaatcagtctttatacctctaccatttattcacaagtatttattttatgtttttatttactttgtagagacagtcttgctctgttgcctaggctggagtacagtagcatgatcatagttcactgcggccttaaactcttgggggctcaaacagtcctctcgcctcagccttccgagtagctaggaatacaggcatgcaacaccatgcccagctattaaaaaaaatttttttttgtagagtataggtctctctatgttgcctaggcttgtcccaaattcctgggctcaagcaaacctcctgctttagtctcccaaagcgctgggattacaggcatgagccacgatgcctggcttcaacaagtatttattgagtgactattatatgctatagaaaatgatgagtatacagctataaacaaaatatatggcttctgtgctcatgttacagtataatggagacaagaaatcaaataaatatattactaaaaacattacaaattgtgataaatgctattgcaatgggaaaaaaaggaacactgtaacaatagagcctctttggggaaatgatatttgatctgaaacctaaaggataaagacctcaagtgatcaaagagagtgaaagtgaattctaggcataaggaccagtgcatgtggccttgagataggaaaaatattggactactatcttttcaggggaactgaaaggccagtatgattgaagccctgtcagcaaatggaagttgacagaagtcagatcattcagggtctcatgagctgagttaaaaattttgtatctaggccaggtgtggtggcttacacctgtaatcccagcactttgagaggtgaaggcgagaggatcacttgagtccgagactttgagaccagcctgggccacatagtgagaacacatctctacaaaaaaatttaaaaattatccaagcagggtggcatgcacctattgacccaggtacttgggagtctgaggcttgagcccagaagcttgaggctgcagtgagtcctgtttgcactactccagcctgggtgacagagcaagaccctgtttcaaaacaaaaaaacagaaaaactagaattttgtatcttatgctatgtgcagcaagaaataaggaggcaaaagtataatacagacaggaaatctagttaggtgatcattctaatagtccaagcaagagctgacgtgctaaggcttggactaaggtgattgcaagtgaaggtactggggtcaatactggagatagaatcaaccaaactgaagtacaattcccaggttttttggtttgagcagagtggctggaggtgctatttagtgagatgtggaagattgggggaggatcaaatttatgaagaagataggggaaatcaagaatttaatgtctataagacattcaaatgaaaatgtcatatgaataggtgaacataacaagtgatctcagaggataggtctgggatggatattataaatttgggaatcatcagcatataagcagtagcaaagggatgaattttatatatagaaaatgtggctgggtacagtggctcacacctgtaatcccagcactttgggaggcagaggcaggtggatcacctgaggtcaggagtccaagaccagcctggacaacatggtgaaaccctgtctctactaaaaatacaaaaaattagccaggcatgatggtgggcgcctgtaatcccagctacctgggagactgaagcaggagaatcacttgaacccagaggcagaggttgcagagagccaagattgcaacattgcactctaccctgggcaacagagcgagacaccatctcaaaaaaaaaaaaaaaaaaaaagaaagaaaatgtatatcaagtaaaaagataagaaggaccagaaccaagcaatgaaagtattcaacactcaaaggttgcatgaaagcagaaggacttgcaagggagactggagattggtaagagtagaatggaggtaacacaggagtcatgaaagtgtagtctttagcagaaaagaaggcatgtgtttcaagaaaaaagtagtcacttgtatggaactgttgagagacttagaaggatgagaactgaaaagcatccactgatttagcaatacagtagtcattagtggtttttacgagagcagtttcaatagcatagttgggcagaggacagaacagaatagctttaagaatgaatgggagatgaggaagtagggatagcacttctgaaaatcttgaccataaaatggggcagagagataaggcaataatccaaagggaatgtggctatcaaaaaaaggccttctataaagatggaagaaatcagagtgcttggaacacttctcaggaccctccctcctttggtcatcctctgttccaagcacttggaacacttctcaggaaagaaggaaaaatgttgtcagcattgttctgggttacaaaacacacacacacaaatacacacacacacatacatacatatgcatgaagaaaaaatgagaaggagaatacagataaaagtaagtttgaaatgaggtgttagaagaattactagatagtctctattttcttaataaaataatgtggcaaagctataaattaaaagtgtctagaagaggcaggaaatggcacaaatggaactgctggtttaaggacaatggagaagaaatgaaattactgttgcagaaaatggaaggccaaattaccagaagagaaaaacaatataggagaaagaacaagaaaagcttcatattagttgggcatggtggcgcgcacctgtaatcccagctactcgggaggctgaggcaggagaattgcttgaatccaggaggtggagtttgcagtgagccaagatcatgccactgcactccagcatgggtgacagagcaagaccctgtctcaaaaaaaaaaaaaaagaagaagaagaaggagaagagaaaaaagaaaagcttcatagcagaggcagcatttcagaaggtctttaaagattgatgacctcagatgggcatggtgactcacacttgtaatcctagcatttgggaaactgaggtgaggagatcacttgaggccaggagtttgagaccagcctggacaacacagcaagacttcatctcattaaaaagaaaaaaaggagtgatgacctccaagggtaaatggaatttcaacagtcagggaaatggcatttcagtaaggatacatgacaaagagagacacaggaaaagagactgagacacaaatagaatgatcaaaggacataaagatggaaagtatatggaattttaggaaacaggcaattgtctactgcaactggaataagcaaagagggaaaaaacactgggtagaaacaagactggaaaaatcagctatggcctaattgtggaagaatctgaataccatgactgaatgcctccaccacttattaggtaggaaaattacataatctctctgagcctgtatcctcctcttctggaaaatggagataattaacgcctattttacaggactgactgttgtttggttacataagataaatattgaaagcacttagtgcttaactcacagtaaatgctcaataaatggcagtaaaagttggggttgttatcttgggctttactctgaaagcagagggaaaacattacatgtttttgaacagatgtgaaacagggagagactaaagtaagagaaaatagttaaaggccattgtaatagactaggctagagataatgaacacctacataaagtcagtgatggtgggaactgaaataataaaggcagctgggcccggtggctcacacctgtaatgtcagcatttcgaaaggccaaggcagaagaatcacttgagtccaggagtttgaaaccagcctggacaacatagcaagaccccatctctacaaaaaaaatttttaaagaaacaaaaaaaatatataaagggaaaaaatatagagatgacatgacacaattagtgggtcatgatacatttggcagatcaggatatcctggaacccaaattcaatattctgaacactctgaagaatctttccttgatgaactcctagacattttcctgactaatggagtcccagtttcatgactatcattagattttactagggaggaggttagaatttttacttatgaagaattattaaatttagcattttgagataagaattttggggggttgcaggagggagagcatcaggaagaatagctaatggatactgggcttaataccaaggtgatgggttcatctgtgcagcaaaccaccattgcatacatttacctcctgcacatcctgcaggtgtaccccataacttaaaatagaagttgaagggaaaaaaaaaaagaactaaagaactatgaatcttgggagaaagaatactcagaaaaatatgagatatcaaactatggttattacaacttcattttcatttcaacaaacagtatctccatctgacagaggattgatagccagaatatataaggagctcaaacaactcaataggaaaatatctaataatccaattttaaaataggcaaaagttctgaatacacatttctcaaaagcagacatacaattagcaaacagctatatgaaaaggcgcttaacatcactgatcatcagagaaaagcaaatcaaaactacaatgagatataatctcactccagttaaaatggcttttacccaaaagaggcagtaacaaatgctaagaggatgtggagaaaagggaacccttgtattggtggttcccttgatggctgtataaattaaaacacaatgggaatgtaaatctccatacaaccactatggagaacagtatggaggttcctcaaaaaactaaaaatggaactgccatacaacccagcaatcccatagctaggtaaatgcaaaaaataaaggaaatcagtatattgaagagatatctacactcccatgtttattacagcactattcacaatggccaagatttggaatcaacgtaagggtccatcaacagatgaatggataaaaagaaatatgtaataaaatagagagtatatctactccatacacacaatggagtactattgagccataaaaaagaatgaggtagatatttccctaagacatatttcctttctactatatattcttttttttttttttttgagatggagtctcactctgtcacccaggctggagtgcagtggcgaaatcttggctcactgcaagctctgcctcacgggttcacactattctgcctcagcctcccgagtagctgggactacaggtgcccgccaccatgcacggctaattttttgtatttttagtagagatgaggtttcaccgtgttagccaggatggtctcgatctcctgacctcgtgatccgcccgcctcagcctcccaaagtgctgggattacaggcatgagccactgcgcccgaccactctactatatattcttgtgcaagtagatttccatttgtacaactttaatttcaatgtaacaaacatttattaagcactgaaatgtgccaagcattgttctaagctctgaaaaagtgcttcttggctcaggattcataccagactctcctggaaagtattagaataacgattcctgggctccacgaccagaggctgtaatctaataaatccgggataggactcaggaatccacactttttttttttttttttttttttgagatggtatctcactctgtcaaccaggctggaagtacagtggcacaatcttggctcacagcaacctccgccttctgggttcaagtgattctcctgcctcagcctcccaagtagctgggactacaggtacatgtccccatgcccgggtaagttttgtatctttagtagagacgtggtttcactgtgttggccaggctgttctcaaactcctgacctcaagtgatttgtctgcctcagcctcccaaagtgctaggaatttacaggcatgagctaccgcacccggccaggaatgctttttttttttttttttttttttttgagatggagtttcgctcttgttgcccaggctggagtgcaatggcacaatctcggctcaccacaacctccacctcccgggttcaagccattctcctgcctcagcctcccgagtagctgggattacaagaatgtgccaccacgcccaactaattttgtatttttagtagagatggggtttctccatgttggtcaggctggtctcgaactcccgaccttaggtgatccacccgcctctgcctcccaaagtgctgggattacaggcgtgagccaccgtacccagctggaatccatatttttaataaagtctgttgcacagttaaggagaacctaaacattgttttccattttacagatgtcttatgtctgagctgtatttacttacaacactttgacaccgaatgtacaggtttttttccatatcaacaaccagttctgtccagctaccaactgggagtctcacaattgaattcttatattaattacccagagttagcacagatcctacaggttaatggctcagtcccacaagactgtcccctacttcagataccagttgcaaatcccagccacctatactcctgaccaaccagctataaatcggagattcccatgaccccttcctcgtgtttgataatttgctagaatgacatacagaacacaggaaaagagtttacttactattactgctttataaaggatacaactcaggaactcaggaagagacatatagggcaaggtatgggggaaggggcacagaacttccaaaccttcctccaggcatacagctctaccagaacctctatgtgttgaccatcccagaagctctatgaactctgttgtttacaaggttttatggaggtttcattaagtaggcatggctgattaaatctctggccacttgtgattagctcaattttcagccccttgcccctccctggaggttagagagcagacttgaaagttccaattctctaattattccttggtctttctggttaacagaccccagcctgaagctatccaggggccctcagaccccagtcatctcattatcataaaagatacttaccggtcaagaaatcccaagggctttaggaactgtgtgccaggaaccaaggatagagaccaaatgcttatttattatcacagtatgacatgaaagacccttaatgacctgacctctgtcttaccggcctcttcttttgcaccaaccatgctgcccaccttccattgcagtaatagtcaatgacttgtaattgcctgaaaatgctagacgtttcactgatacttctgcacattgtctaccctaccagctctacccttacatacacacacacacacacacacacacacacacacccctaactttgctagccttttttctgttcatccttcaaattctagttcaaacatctccaagaccttattggacccttaacagaactcattgagcccaccataataataattagtactgttgtgagtattagaaataatgttaagcacctgtgacacaatgtttggctagacactaacatatcctatgggtaacaagaaccctctgaagtagtgtcatgagatgaagatgtggagaaaggggaaacctcgtacactgttggtaggaatataaattagtactgccactacggaaagcagtatgaaacctcttcaaaaaactaaaaatagagcttccatataacccagcaattccactactgggtatatatccaaaagaaaggaaatcaacatatcaaagagatatctgcactccatatttactgcagcactattcacaacagccaaaatttagaatcaggccaggcgaggtagctcatgtctgtaatcccagcactttgggaggccgaggagggtagatcacctaaggtccagagttcgagaccagcctggccaacatggcgaaaccgtgtctctacaaaaaatacaaaaattagctgggtgtggtggtgtacgtctgtagtcccatctacttgggaggctgacgtgggaggatcacttgagcccagggaggttgaagctgcagtgagccgtgatcatgccactgtactccagcctgggtgacagagaccctgtcacagaaaaaaaaaaaaaagaaaaaaagatttgcaatgacatgagaaagtgttgttatatggggaaaaaaagcagaaagcagagctgtatattcattataatatcatctatatgtatatttttaatgacatttatccttaagtggtaaaaaatacagaaaggaaatatataaaatatgaatagtgattactatggaatgattgtattcctcagtgtttctatttttttaaatactttttgaggctgggcgcggtggctgacgcctgtaatcccagcactttgggaggccaaggcaggcggccctgcctaggcaacagggcgaaaccccgtctctactaaaaatacaaaaattagctgggaatagtggcgggcacctgtaatctcagctacttagtaggctgaggcacgagaatcgcttgaacccgggaggcggaggcagtgagccaagatcatgccactgtactccagcctgggcgacacagcaagactctatctggaaaaaaaaacttcttggatttcctacttttctaataataaacctacattacttctaataatttaacaatataaagtagtaaatgcaaacttcatttgtaaatttatgctaacagaaagaaaagagggggaaatgcatgcattacacttgaaataataaaagtaataaacactgtcaagcagctgtaccgagccttacttacaacattcataatttcatttccacaattagctaagtttatagaatgcactccagagactaaaatacatatatggccacagacagctcctgttttctgaatggaaagaaggggaggatgggagatggaaagaggaaactagttccctcagcaaaggagtaccaagttgcagatctcataatgaccttctctgtctactcactacaaaggcaccatggcaactgggaacctcagaatatcaaggaaggagcactgaaagtagaaagtttggagagctattaggggaagggaagaagctcaggaaagctaaatgagaaatgctaagaaagtcaatacataagaacactctcaaactatccataagcaaagccttaatataaacaaaaccagagccaatttccttatttcccatgtcaaagcttgatagtgatgaaccaatagataggaagcaggaataaaatttcctgcactttcttttctttttttctgtttttgagatggagtcttgctctgttgctcaggctggagtgcagtgcagtggcgtgctgtcagctcactgcaacctccacctcccgggttcaagcaattcttatgcttcagcctcccaagtagttgggattacaggtgctcgccaccacctggctaatgtttgtatttttagtagagacaaggtttcgccatgttggccaggctggttttgaactcctcacctcaggagatccacctgccttggcctcccaaagtgctgggattacaggcgtgagccaccgcgcctggcctcctgcattttcaatagtggttattctcaacgtgtgaattataatattgatagtatatatttgccatcatcaaaaggctttcagacctaaatttccaagttttaagcactaacatgcaaaagacttaaagaggtttttccagtaaaaaatttttatcttataaaaggactccttgataataaataatgtattataccaatatggcacattttactattccaaaagtttcatagctattacttaactctatctctaccactagatttaaataaagtcatttcaaactcaaggagtttaaagtgagactaaaaagaaatgagaatctgtatgtctttcctagtcaaacacaaacatatatagctaaaactaaaaagctctgtcataaatggtacataaaatgattataaaattcattaaaatatcatcattaatgcaattaataccaattgttgctctgtaactataaaaagtgtagaatggtaaatcttcctttatttttccttctgtttctctatatgctaccaaattttcactagcaatcatatactttcatgatttgctaacttcctcttaaacgagtcactagtcactgtcataaaaaaaggtggggggtggtaatgtgatagaatgtgacagattaagaaatttaaagaacataatacacaatttgtggattggatacttgcatgaaggaaccagaattttcaggttccttggagaaatgaatagagtgtgtatattaaattagattaaaatttattgaaatagaaagtgaatttttttgactaaaaaaagcagattataaaacagtgtgtacagtatgacctcattttagtaaaaaaatatgaatatatacatatatgcatagaaaaggatacagatggtagggagtaacctttgggtggcaaatatacaagcgtttatgtttgcttgcttgtgttgttttttattttctattctgcttctttaataaagcatgatttaaaaaatattttttctaggctgggcacggtagctcacacctgtaatcccagcactttgacaggtcaaagtgggaggaccacttgagcccaggagttcaagaccaccctgggcaacgtggtgagaccccatctctacaaaaaaatttaggccaggcgctgtggctcacgcctgtaatcccagcattttgggaggccaaggtgggtggatcacgatgtcaggagttcaaaaccagcctggccaagatggtgaaaccctgtctctactaaaaatacaaaaaattagctgggggtggtggcaggcccctgtaatcccagctactcaggaggctgaggcagagaattgcttgaacttgggaggcagagattgcagtgagccaagatcatgccactgcactccagccttggcaacagagtgagactccatctcaaaaaataaataaataaataaataaacttagctgggaatggtggcacatacctgtagtcccaactactcagggactgagcaagaggattgcttgagcccaggagtctgaaggtacagtgagccatgatcacaccactgcactccagcctggacaacagagagaaaccctgtctgtaaaaaaaatttttcaagtatatataaatatatattttctaacttctatccctttctaacaaggctaacatttaattagagaagaactgctcaacagaccataaggcctgggcgcagtggctcacgcctgtaatcctagcactttgggaggctgaggtgggtagatcacctgaggtcaggagttcgagaccagctggccaacatggcgaaaccctgtctctactaaaaaaacaaaaattagccaggcatggtggcgcacacctgttgtcccagctacatgggagcctgaggcaggaaaatagcttgaacctgggaggcagaggttgcagtgagccgagatcacaccactgtattccagcctgggcgacagagcgagacttcatctcaaaaaaaaaaaagcatatctgttacaccaaaggttttagtttagtgtagtagtttatagtacgagctctgactagattcaatacccaagctggccaccttgggcatgttatttaatttatgtctcaattccccatccataaattgtgggcaataggccaggcacggtggctcctgcctgtaatcccagcactttgggaagccgaggcaggtggatcacctgaggtcaggggttcgagaccagcctgagcaatatggtgaaaccctgtctctactaaaaatatgaaaattagccaggcatgatggcgggcacctgtaatcccagctacttgggaggctgaggctagaggattgcttgaacctgggaggcagaggttgcagtgagccgagatcacgccatcgcactccagcctgggcaacagagtgagactccatctcaaaaaaaaaagaaaaaaaaaaattgtgggaaataatagcacaatacttacctcatgggattgttttgataattcagtgtggtactccacataaagcacagcagagtatccggcatacagtaaagcacttattaaatgtaacctattattaccattatttttctaattagccactgagaaaacttgactaatatttcctaaagttaatgtgaaaaatagaatgtaggaacaatagataggccttctctcactattgtcctctaaacttctcttttgacccaatggaagaagttgaaagtcaatcccagatcctcccagaatctgaccttgacactattactgcccaaggataaaggtctgcacagctttatatgaattgtgaatgaaaatgaaatctggctgggcgtggtggctcacacctgtaatcccagcactttgggaggccaaggcaggtggatcacgaggtcaggagttcaagaccagcctgaccaacatggtgtctctactaaaactacaaaacgtggccgggtgcggtggctcacgtctgtaatctcagcactttgggaggctgaggcgggcggatcatgaggtcaggagatcgataccatcctggctaacacagagaaaccccgtctctactaaaaatacaaaaattagccaggcgtggcggcatgtgcctgtagtcccagctgctggggagggtgaggcaggagaatggcgtgaacccaggaggcggagcttgcagtgagccgagattgcgccactgccctccagcctgggcgacagagcgagactccatctcaaaaaaataaataaataaataattaaaaaaaaatacaaatacaaaaattagccgggcatggtggtgcacacctgttatcccagctactcaggaggctgaggcaggagaatcacttgaacccaggaggcggaggttgcagtaagccgagatcgtgccactgcacccagcctgggcgacagagcaagactccatctcaaaaaaaaaaaaaaaaatgaaatgtggtatctaggagcttattccaaactcattaacatactatgactagtatcatgggagaaactttacaaattatttataattacaaaagagctcaaaattttctagttaaattattctgaagagtccaacatctttacaggcaatctcatctgaattctcaattttcaaaaatattggtaaagtacttttctttctagatcagaaaagaaatagaaatataactcaacttcagagcccttcctgagtgaatatactttctccttccaaagcaacaactattgtcttgaaccccagtgatagacatcttacgctggttttaggtatacacatataacagcaaatacagattgttctcagataaagttgttaaccaaacatgcttcattttatgttaaccataaaatgaagatcattcagtgacttgaacatatgttttaagacacatgagagaaaattgagatcaagtttcaaatactattgatatgggaaggggacagggaagtgctgggtagagaagggcagagtccctgtcaagggctccacctttgacctgtacctatggacctaagtgagaacaggcatgcctgtttttgcatccaaatgcttcattttccaagaccactctggcctgcaacacccccaatcctgtgcccaaataaacccgagaccacagcaggcacagacacaagtgattgaacatcaagaggagcagaggaacagaccagcagacaccagcaggccagcagacttgcaatggtggaacgacaaggcagagaaagagaggagggacgtctggacaccgaggggaattcaactcggggccgtcagagaagagtccggcctccaggagccctgattcctggggaagaccacctccctactccagcccctccttccagctccccatccatgtcgctgagagccacttccaccactcaataaaaccttgcactcatccttcgagcccacatgtgatccaatttttctggtacactgggcaagagctcaggatacagaaagctgtcacactggccctctgcccttgcaataaggcagatggtctattgagctggttaacacaagctgtctgcagacagcaaagctgaaagagcacactgtaacacatgctcacttgggctttcagagtcgcagacaccaccccaagatggtgccgtggggctggagcccaaaagtgcttcccatggctgttgcacctgcccatctgcatcctccccttaggggtttgagcagtggggcaaccgaaggagcaagcaagacacatccctgtggtacatcctgcaagggagatgagggaactctcctgtttcactataacatgaagtatacactgggcaaggtagctcacacctgtcatcccagcacttgggaaggccaaggccagacaatcacttgaggccaggaattcaagaccaaccagggcaacatagcaagaccccatctctaaaaaaattttaaaaattagctcagcacggtggtgcacacctataatctccactactcaggaggctgaagcaggaggattgtttgagcccaggagttggaagttagtgagctatgattgcgccactgaacacttcagcctgggtgacagagtgagaccaaacaaacaaacaaaaaacccatacatttagcataggataaaaaagatttaaagaaatcacactatgctagagaggaaggaggtggatttttaaaaaagaggaaagaaatcacactatgctaagaggtaaaagacccaaatgtggagataacctgttccaactgtacttcaaccagaaattcagcttattagttgacaaactgtttacagttctatttggttgatagcatgcggtgaattttaagtatgcaaaacgatctgacctcaagtgacatcccataggagcagagaaactgccaatatccatacaactagatggctctgttatatgccaccaaatcatacactggttatcaaaattaagatgtccactggccgggcgcctgtaatcccagcactttgggaggccaaggcgggtggatcacctgaggtcaggggttcaagaccagcctggccaacatggtgaaaccccatctctactaaaaatgcaaaaaattagctgggcacagtggctcacacctgtaatctcagcactttgggaggccgaggtgggcagatcacctgaggtcgggaattcaagaccagcctgacctacatggagaaaccccatctctactacaaatacaaaattagccagacgtggtggcgcatgcctgtagtcccagctactggggaggctgaggcaggagaatcacatgaacctgggaggcggaagttgcagtgagccgagattgcgccactgcactctggcctgggcaacaagagcgaaactctgtctcaaaaaaattaataaataagccaggtgtggtggctcacgcccacccatactcccagcactttgggaggctgaggcgggcggatcacgtgaggtcgggagtttgagaccagcctgaccaacatggagaaaccccatctctactaaaaaatacaaaattagccaggcatggtggcacacgcctgtaatcccagctacttgggaggctgaggcaggagaatcacttgaacccgggaggcagaggttgcagtgagctgagatcatgccactgcactccagcctgggcaacaagagtgaaactccatctcaaaaaaaaaaaaaaatttgccaggcatggtggcgcatacctgtagtcccagctactcgagaggctgaggcaggagaattgcttgaacccgggaggcggaggttgtggtgagccgagatcgcaccattgcactccagcctggggaacaacagtgaaactccgactcaaaaaaaaaaaaaaaattaaattaaaaaaataaatgaataaataagtaaaataaaataaaatacaaaaaattagccaggcatggtgggctgggcacagtggctcacacctgtaacccagcactttgggaggctgaggcaggcagatcacaaggtcaggagttcgagacctgcctgacgaacacggtgaaaccctgtctctgctaaaaatacaaaaattagccgggcatggtggcgcgcacctctaatcccagctactcagggggctgaggcaggagaatcgcttgaacccaggaggcggaggttgcagtgagccaagatggcgccactgcactctagcctggggacagagcgagactccctctcaaaaaaaaaaaaaaaaattagtgcggcatggtggagagcacctgtaatcgcagctacttgggaggctaagggaggagaattgcttgaaaccaggaagcagaggttgcagtgagccaagatcgcgccattgcactccagcctgtacaacaagagtgaaactcagtctcaaaaaaaaaaaaaaagtccacattcagcctttcttcttaaatgttcaattgaatactagtgagttccagaaatatatcaacctggctgatatatcaacctctagctgatcatatctaaaaataaaaagccaaatcagttgtctacaatgaggtctgtatattcccaccaagctataactactttttacttagggtcttattttcttttctttctttttttttttttttttttttttttgctctgttgcccaggctggagtgcaatggcatgatctcggctcaccgcaacctctgcacccccggattcaagcacttctcctgcctcagcctctcgactggctggaactacaggcatgtgccatcgtgctcggctaattttgtatttttagtagagatggggtttctccatgttggtcaggctggtcttgaactgctgacttcaggtgatccacccaccttggcttcctaaagtgctgggattgcaggcgtgagccaccacgcccagccagggtcttattttcaaatgtttgggtcataaagcttagaaagtgattcatccagctgggcatggtggctcacacctgtaatcctagcactttggaaggctgaggcaggtggattgcctgagatcaggagttcaagaccagcctggccaatatggtgaaaccccatctctactaaaatacaaaaaaattagccgggcatggtggcacacacctccagtactagctgctcaggaggctgaggcacaagaatatcttgaacctgggaggcggaggttgcagtgggctgagattgcaccactgtaattcagcctgggtgaaagagcaagactgtctcaaaaaaaaaaaaaaaaaaaaatggccagggtcaggcataggctgacaggcacagattacaggctcatgcctgtaatctcagcactttgggaggccaaggcaggtggatcacctgaggttgggagttcgagtctagcctaacatggagaaaccctgtctctactaaaaacacaaaatcagcctggcgtggtggcgtatgcctgtaatcccagctactcaggaggctgaggcaggagaatctcttgaacccgggaggcagaggttgcggtaagtggagattgcaccattacactccagcctgggtaacaagagcgaaactccgtctcaaaagaaaaaaaaaaaaggctgggcatgctggctcacgcctgtaatcccagcaatttgggaggctgaggcgggcagatcacctgaggtcaggagttcgagaccagtctggccaacacggtgaaaccctgtctctactaaaaatacaaaacagccgggcatggtagcgggtgcctgtaatctcagctacttgggaggctgaggcaggagaattgcttgaacctgggaagtgaaggttgcagtgagccgagatggtaccactgcactccagcctgggcgacagagcgagtctccctctaaaaaaaaaaaagaaagaaagaaaaaagaaagtgattcacccagtctttcattggactctagaaaatacatgaggcaaatcatctccatcgcaggaaaagtctattttctatttgggctcatccatcataccactagacttctcagcacctaaacttgagagagagactcagtcccatcttacattatggcaattacttcatttggtttcagatgacctccagttaacatctcctaggaatgtacctgcccccttaatctatgtcacccatgaaggattaggctattcgttctaagagctgatcctaaactcaacttagtctctatttaactttgagttccaggagtgaaaaggagcatctgaatcaatatcttcatttttatagatgactccaaggagataatatgtactgtccatggtcacacacctaattagtggcagatgtcataacagaggtctttcacctatcaaatgaatttgactcaattaaaattaccccaaaggtcaccatatccagaagtgacttaaggaatggataaacagaaaacgttttttctattttagaacattagctagctgaggagtgagttggaactggcattgtctcctttccatgctgctgatcacacttcaatccatggctcctccacgagctacggacatgatttttgcaacagtaaggcatgcaaagaaattccagacactcatgccactgaccacatagactttgcataagaaccatcaactttgggaatgacttggcaactacaaactgccttgtgatatcactagctgagtttcttataacacatttatctcaccatagccaaactcagtttcctaatccagcaaatggatattatgtttcacatagactcaaactggacagatttctcaaggtgctgtgtggttttatggatttagagttaaaccagtctttctcaacaggggcactacgacattttgagtagcagatttcttggttgtgtaggattatctactataccacagaaggtttagtatcattggtcctttgtcctttgtccgataaatgcaagtagtcctgccagtcacaaccccccaacacacttccaaatgacctcaagagagaagaatgccaccactagtattaaccttagagccaatcattaagtgaactataaaataaaaaatgtttacataaagacctaatcccttttccctgccactaaaatactgctctctattcctctttttaacccagagataatgctttgttcactaactccataaaaccaactttgtctgaactagttatataattaagacacctgtatggacgggaaagtagagtagaaaagttagtgaaataaaatcaggatatgagtttgaatccaagttctctggctattcaaacttaggcaagttatttctcctcattgggccttagttttcccaactatcaaaaagtattttgtggccaggtgtggtggctcatgcctgtaatcccagcactttggcaggccatgataggaggatcgcttgaggccaggagttcaagaccagcctgggcaacatagcaagacctctgtctctatttaaataatgttttaaattaattttttaaaataaaataaaataaaaagtgttaggctaaattatctctctggtttattacaattctaggaacctgtgaagtaaaacataattaacttgctttacacttttcttttgacctctacatagctaaatgagggtgaccactaacgaacactgcctagtctctcagaagccccgatcccaagccccagggataacagtaagacagaacaatcacatccagccagatctcatacaggattttattatagagttgatatatttagtgtataaaatagagctgaattattttatgacccattaataataaaggtgccaagatagtaacagcaacaacagccaccctaacttatgttatctagggtacacctataatctgaatgctggctgtacacaacaatcacctggataccttaaaaaaaagccccagttccacaccaagccagtatcaaatgaatcgaaatctctggggatggggcttatctcccaaggctccccgaggtgattctgatgaacagtgagaaccaagaaccactgatccagaccttttaatccaagaactgaaaagtaaatgaccaaaggttagtatctcacacgctagttatataatcaaacatcgataaataaaaacaatctagtgttactatgtactgacattctcagttagggagaactgtgtttctagagaaaaaggagagctctattaacagccctttattggggactggccctgctagaaacagaatataacttcctgacaatctgatgaattagttcaaaaaaacttactacgaagttgacaacacctggagaagtcctatcaatcatcaagatagttagaacaatgttagtcaaagtagtacaaaaactgatgttcctcaacctaactcttactcactaggtctcactgaaagacctagcaggtagaagtggccaggtgtagtggttcatatctttaatcccagcactttgagagactgaggcaggcggatcacttgaggtcaggaattcgagaccagcctggccaacatggcgaaacccggtgtctatcaaaaacaacagaaatcagctaggcgcaagggcatgcacttgtagtcccagctattcaggaggctgaggcaggagaatctcttgaacctgggaggcagaggttgcagtgagctgagattgtaccactgcactcccatttgggcgacagagtgagactctatctcaaaaaaaaaaaaaaaaataggctgggcggggtagctcacacctctaatcccagcattttggaaagctgaggtgggcggatcacaaggtcaggagttcaagaccagcctggccaacatggtgaaactccatctctactaaaaacacaaaaaattagctgggcatggtggcaggcgcctgtaatcccagctacttgggaggctgaggcagaagaattgcttgaacccaggaggcggaggttgcagtgagctgagaccgcaccactgcactccagcttgggcaacagagcaagactccgtctcaaaaaacaaaaacaaaaacaaaaaaaacctagtaggacatgaaaaatttgatgggaacatacatgatttctgaaaaatacatcatttctgacttcctcaacaaagctttgagttcagtgacataggaaaaggcaaagcagtcttagctgaaatcatccttgctcttttcagaacataatcagcaaaactaacaagacagattaaataagtagaccattgaactctctcttaccttatgtgcaaggccaagccatcctgtaggctagagatccccaaatcagagagtgtatctgagccaacagaagcaggtgacaaggagccctccttctcctccagtaggtccaacttcaccaggttgctgatctcatcctctgagttatcttcagacacagaacctattatgaatcgagagtgctggttcagctccagaggttgggccaagggagatggttcatccattattcctccaaaatgagctcttacagctatggagaaaatgaaaagtgagaaaggcaggttatgaataataatctatatctgaggtcagccagaggttatatctaataaaccatagctgagacgtggaagcaaggcaatttgagaactaacttccttggctattctatttcagggcctttaatttctacaagggaggaaaattgagatcatgataactatgcccataaattaaaaccagttcccttttcctcaaagaaatttttctcaaaagcctataaggcattcctaatctcattttcatttggtggtgtccaggaaataattatgatcaatggggaaacctttgcagtaggaaaaagctgcttgttgtgatattgatattttggttgttagtaatgggggaataaatggtaagggtctggatagagtaatggttgtttgaaataatatttaaactacataatgctcatctggcttcaaacactatatattgagaggctataacttttattttattatttatttatttgagacagggtctcactctgtcacccatacagcatgcagtactacaatcatggttcactgcagcctcaaactctttgggctcaagtgatcctcctacctcagcctccccagtagctgggactataggcacgtgccaccatgcccggctaattctatttttatttttcatttatttatttatttatttatttatttatttatttatttagagacggagtctcgctctgttgcccaggctggagtgcagtggtgcgactgccactcactgcaagctccgcctcccgggttcatgccattctcctgcctcagcctcctgagtacctgggactacaggcacccgccacaacacccagctaattttttgtatttttagtagagatggggtttcaccgtgttagccaggatggtctcgatctcctgaccttccgcctcagcctcccaaagtgctgggattccaggtgtgagccaccgcacccggcctattttttttttcttttttgagacggagtctcactctgtcgcccaggctggagtgcaatggcacgatctcagctcactgcaacctccgcctcccgggttcaagcaattctctgcctcggcctcccaagtagctgggattacaggtacccaccaccatgcccggctgacttttgtatttttagtagagatggagtttcactatcttggctaggctggtcttgaactcctgatctcatgatccacccacctcagcctctcaaagtgctaggactatgggtgtgagccactgtgcccggtctaatttttaaatattttgtagaaatggggactccctatgttgcctaggctggtcttgaactcctgggctcaagcaatcctctcaccttaggctcccaaactgctgggattacaggtgtaagccactgtgcctggcctatgaattttacgtatgtgtatacttttaaaacaaactccagataggtaatttttaattaaaaaaaaaaaaactttacttgtcctcatgagttttttcttaaattatgcattttaaaatgtcaccccaaaatgactacttttggctctaatgtgctgacactgatatgagaagaaaatgaatctatcaccaaatttaaaatctataatcacctcaagtaagtataatttttctaaatgtagggccttaccagttaggattagatactgccaatagctaactaagaaactaattaacagcaaaccatcatgacacgtgtttacctacataacaaacctgcatgttctgcacatgtatcccagaacttaaaagtataatttaaaaaaaaaaaagaaagaaaaagaaactaattaataaagaccaaaacagcaacattcattctcttttatggaatgaagtgctgcccataaaaatttaaaaatattttttaaaaaccaaaataagagcccacaacaataaaaacccaaactaaatgaaacaatatttcttctgtcatctcaaaaatcctattttaaaatttcaaaactacagatcaactcagtattaaatagcttgtacccagatcaattattttaattcagaaaataagcctgggcgcggtggctcacgcctataatcctaacaacttgggaggcagaggcaggaggattgtttgagtccaggagttcaagactagcatgagcatcaaaacaagatcccatctgtacaaaaaaaaaaaaaaaaagattggccggacgcggtggctcacgcctgtaaataccagcactttggtaggccgaggtgggtagatcacctgaggtcagcagttcaacaccaacctggccaacatggtgaaaccccgtctctactaaaaatacaaaaattagctgggtgtggtaacaagtgtataatcccagctactcgggaggctgaggcagaagaatcacttgaacccgggaggcggaggttgcagtgagctgagatcatgcctctgcactccagcctgggtgacagagtgagactctgtctagaaaaaaaaaaaaaaaaaagattaataattcccaattgtggaccttttagaggttcccttgactgatcccgacctcaacttgtatactgatggaagttcctttgtagaaaaaggactttgaaaagtggggtatgcagtggtcagtgataatggaatacttgaaagtaatgccctcactccagcaactactgctcagctggcagaactcatagccctcactcaggcactagaattaggagcaggaaaaaggataaatatatatacagactctaagtatgcttacctagtcctccatgcccatgcagcaatatggagagaaagggaattcctaacttccaaggaacacctatcaaacatcgggaagccatcaggagattattctaggctgtacagaaacctaaagaggtggcagtcttacactgccggtgtcatcagaaaggaaaggaaaggaaagggaaatagaagggaaccgccaaccagatattggagccaaaagagccgcaaggcaggaccctccattagaaatgcttatagaaggacacctagtatggggtaatcccctccaggaaaccaagccccagtactcagaagaagaaatagaatggggaacctcacggggacatagtttcctcccctcaggatggctagccaccaaagaaggaaaaatacttttgcctgcagctaaccaatggaaattacttaaaacccttcaccaaacccttcacttaggtattgatagcacccatcagatggccaaatcattatttactggaccaggccttttcaaaactatcaagcagatagtcagggcctgtgaagtgtgccaaagaaataatcccctgccttatcgccaagctccttcaggagaacaaagaacaggccactacccaagagaagactggcaactagattttacccatatgcccaaatctcagggatttcagtatctactagtttgggtagatactttcactggttgggcagaggccttcccctgtaggacagaaaaggcccaagaggtaataaacgttcatgaaataattcccagattcggacttccccaaggcttacagagtgacaatggccctgctttcaaggctacagtaacccaaggagtatcccaggtgttaggtatacaatatcactcacactgcgcctggaggccacagtcctcaggaaaggtggagaaaatgaacaaaacactcaaatgacatctaaaaaagctaatccaggaaacccacctcgcatggcctgctctgttgcctatagccttactaagaatccgaaactctccccaaaaagcaggacttagtccatacaaaatgctgtatggacggcccttcctaaccaatgaacttgggcttgaccgagagacagccaacttagttgcagacatcatctccttagccaaatatcaacaggttcttaaaacattacagggagcctgtccccaagaagagggaaaggaactattccaccctggtgacatggtattagtcaagtcccttccctctaattccccatccctagatacatcctgggaaggaaactacccagccattttatctaccctaacggcagttaaagtggctggagcggagtcttggatacatcacactcaagtcaaaccctggatactgccaaaggaactcaaaaatccatgagacaatgctagctattcctgtgaacctctagaggatctgcgcctgctcttcaaatgacaaccagggggaaagtaactaaaatcgtaaatcccctggccctcccttatcatatttttctctttactgttctcttaccccctttcactctcactgcaccccgtccatgccactgcaccccgtccatgccccgtccatgccagtagctccccttagcaagagtttctatggagaatgcagcgtcccggaaatattgatgccccattgtataggagtttatctaagggaacccccaccttcactgcccacacccatatgccccacaactgctataactctgccactctttgcatgcatgcaaatactcattattggacaggaaaaacgattaatcccagttgtcctggaggacttggaggactcacttcactcataccagtatgtctgatgggggtggagttcaagatcaggcaacagaaaaacacataaaggaagtaatctcccaactgacctgggtacatagcacccctggcccctacaaaggactagatctctcaaaactacatgaaaccctccatacccatactggcctggtaagcctatttaataccaccctgactgggctccatgaggtctcggcccaaaaccctactaactgttggatgtgcctccccctgcactttaggccatacatttcaatccctatacctgaacaatggaacaacttcagcacagaaataaacaccacttctgttttagtaggtcctctttccaatctggaaataacccatacctcaaacctcacctgtgtaaaatttagcaatactatagacacagccaactcccaatgcatcaggtgggtaactcctcccacacgaatagtctgcctaccctcaggaatattttttgtctgtggtacctcagcctatcattgtttgaatggctcttcagaatctgtgtgcttcctctcattcttagtggcccctatgcccatctacactgaacaagatttatacaatcatgtcatacctaagccccgcaacaaaagagtacccattcttccttttgttattggagcaggagtgctaggcggagtagctactggcattggcggtatcacaacctctactcagttctactacaaactgtctcaagaactaaatggtgacatggaatgggtcgctgataccctggtcaccttgcaagatcaacttaactccctagcagcagtagtccttcaaaatcgaagagctttagacttgctaaccgcggaaagcgggggaacctttttatttttagaggaaaaatgctgttgttatgttaatcaatccggaatcatcaccgagaaagttaaagaaattcaaggtcgaatataacgtagagcaaaggagctgcaaaacactggaccctggggcctcctcagccaatggatgccctggattctccccttcttaggacctctagcagctataatattgttactcctctttggaccctgtatctttaacctccttgttaagtttgtcttttccagaatcgaagcagtaaaactacaaatcgttcttcaaatggagccccagatgcagtccatgagtaaaatctaccacggacccctggaccggcctgctagcccatgctctgatgttaatgacatcaaaggcacccctcccgaggaaatctcaactgcacaacctctactacgccccaattcagcaggaagcagttagagtggttgttggccaacctccccaacagcagttgggttttcctgttgagaggggggactgagagacaggaataactagatttcctagaccaactaagaatccctaagactagctgggaaggtgaccgcttccacctttaaacaccgggcttgcaacttagctcacgcccaaccaatcagatactaaagagagctcactaaaatgctaattaggcaaaaacaggagataaagaaatagccaatcatctgttgcctgacagcacagcaggagggacaatgatcgggatataaacccaggcattcgagccagctacagctaccctctttgggtcccctccctttgtatgggagctctgtcttcactctattaaatcttgcaactgcaaaaataaaaatagaaaaataataattcccaattgtgattttgaagtgctctaagatatggtacattaatagataataaatgtattattaataactctgtatgctataactcactgtaaagtatgaaagtaagtggacaacagtgttccttgacatcagatgagaaaccgtcaatactttaaaatgtttgggaatcaccactcaacatgtgaaaattacatatgcacgattgttctggtgtaatttgtgagtcagtttactcacttacagagacaaacagcatttataaatgctagagtagtgtggttctcaaagtgtggtccctggaccattggcatcacctgggaacttgttagaagtgcaaatttcttgggcccttccccagaccaactaaccatatcagaacctacaggccagcatccattaatctatgctttcacaagccctaaaggttgagaatcactgtggtacaagaataaaacagtaattaacaaattggcaagactgctaaaacaaaactaaagaaaacctataccagcctgggcactatagtgagatcccatccctaaaaaaaaattttttttaattagctgcatgtggtggcatgcacctgtagtcccagctactggggaggctgaggtgggagaatcgtttgagcccaggagttcaagactgcagtatgctgtgatagcaccactgtactccagccttggtgacagagcaggaccctgtctcaaaaaaaaaaaaaaaaagaaaagtaaagaaaactatagacatttcccttttttttagaggcagggtcttgctctgtcactcaggctagagtgcagtggcacgatcctcgttcactgcagcctcaaactcctgggctcaagcaatcctccaacctcaacctccaaaatagctgggactacaggcatgcatcactatgcctggctactttttgtttttttgtacagacagcatctccacatgttgcccagcctagtctcaaactcctgagctcaagtgatcctcccaccttggcctcccaaacggttgggattatcagtgtgagccactgagcccagcctaacattttctgaaagtgaactggagattactttagctaacttctatctttaaaactagaatcagctgggcgcagtggctcacgcctgtaatcccagcactttgggaggccaaggtaggtggatcacaaggtcaggagatcaagaccatcctggctaacatggtgaaaccccatctctaataaatatacaaaaaattagccgggcgtagtggcgggcacctgtagtcccagctactcgagaggctgaggcaggagtatggcgtgaacccagggggcggagcttgcagtgagcagagatcacgccactgcactccagcctgggcaacagagtgagactccgtctcaaaaataaaataaaataaaataaaataaaataaaataaaacaaaactagaatcaaatataaaagtatgatgcaacatgagccaagatcaccactgcactccagcctggtgacagagcgagactccgtctcaaaaaaaaaaaaaaaaaaagtatcatgcaacaaaaaaaatttgctgtctaaatttactatacatttctcccttgaaatattaggtcttaaaaaaagttcaagatcagcctgcccaacatggggaaaccccatctctactaaaaatacaggccaggcacagtggctcatgcctgtaatcccagcactttgggaggccgaggcaggtagatcacctgaggtcaggagtttgagaccagcctggccaacacagtgaaaccccatctctactaaaaatacaaaaattagccgagcgtggcgcatgcctgtaatcccagctactcaggaggctgaggtaaggagaatcgcttgaacctgggaggtgacagagcgagactctgtctcaaaaaacaaaaaaaaacaaaaaacctttaaagggctcccattatttttggccaggcacagtcgctaatgcctgtaatacccagcactttgggaggccaaggtgagcggatcacctgagatcaggagttcaagaccagcctggccaacatggtgaaaccccaactttactaaaaatacaaaaaattagccaggcgtggcggtgggcacctgtaatcccagctacttgggaggctgaggcatgagaattgcttgaacccaggaggcagaggttgcagtgtgccgagattgcgccactgcactctagcctgggtgacagagactccctccgtctcaaaagaaaaaaaaaaaggaagaaaaaaggcagagagggagggaaaaggggtaaaagggagggaaaaagaaagaaagggggagggaagggaaagttccaacagactgaccacactgaagaacaccaaaagttacagcagcaaaaagcctatttctttcacatttacagcagtaaatagttaagtttaaaagtaacagtagatccaaaaaataaaatcccatcccaactaacagaagataatgggtgccttcttcacaaagtaagaaagcaaggcactcaggtgcagattctagcttgcagtctgactgaagttagatgaccacacacaaaagagaaaatccacaaggcacaattctttgactccatgggagaagaaaaagagagttaataaaacacggttcctgggctaataagtgagagtctcaataaggccaacttcaagttcctagctaagaagaccatgaaggcagctttcactaaacggttacatagattggaggcaactcagtgtgaacagctaaaaagcctgtccagcaactgtactgaatagtatttcccaggcacgagcctacaaaccaacagaaaagagaggtcatgtatggaaaattactgagtagctgtccagacactctagaagctactccacagcctgtcccatttccactgattctagtcctgaattaaagagagaatacagttgagtaccattgttagactctttgttcacttcaggttatccaccctaaatctgcctatattattttgtggaagtcaacttttaacacaaaagcctacagtttgatattttacaacatgaacaaaatttttatcacattgtaaacaaggagtattatttgtaactgacctcttataattcttactgtctgagtagatatccacttccaaaaagacctagagagaaagagaaagattttaaggtttttttttttaagaaacaaacttttgtcaattcctgttttgctcagcataatacaaaggtaataatatatgaagtatctattttactggtcaaatctattatttaacttaaagcacaaagtttagcagtttattatttgttcaattctgtaaatcaaacacattacataaagactattgtttaagaaaatattaaacaatagaacaagcttaccatttcacaaggtggcttttccaattgtatactcgatgaatacatttcaaaattttcatttctaatatttcatcaaaaaagaggcagtggggagaagagaaccactagattctctacaattcacttaagctctgattatgtttacaagcggttacacctacacacaaagattgggagccaggtggaagacagagtgcccattatactaagtccctaaactgtaagggatcaaacagtctctagcaactccccaaatcctcggtttccttcttaagcctgacaatttaaatctatctagggtagaaattctcaactctgattatgtttaagaatcacctgcggagcttttaaaaattttacaaagtctaaactccaccctagatctgctgaatcagaattgcagctggagacccagggatatcaactttaagttccacagttaattgacactgatggaaatacacgcttgagaaccactcgttaagggcagagaagaaacaaaaggaaagaacctattacactggtagggaaatctaaaacttccgagaggacccctaaatgacaagggacaacatttaggaatattaggatttatccagttatgcagtctgagctagtattattccctacaactgagaagaggaaggaaaaagtttggatcatgtaaccaaagatgcagtgaaagtggagttaaaacctaggaccaatcaagctcaaactctgactgtcaaatattgcaagtgactgcagacttgaaggtcacttaacgtctctgtatatcatacagacaagcctcctcatctgtaaaaataaaaaagaaagtcttctgggcagtagtgtgcacctacagtcccagctacttgggaggctgaggcagaggtgtgctagagtccaggagctggaggctgcaatgtgctatgaccacacctgtgaaaagccaatgcactccagcctgggcaacatagcaagacccccatctcaaaaataaataaattaacgaatttaattaagtttaaagaaggtcatatgtacctcatgggactgctgtgaaaactaagaatatatgaaaggattttgtaaactataatgcaataggccagtgtttttcaaattatgggttaccacccagcaaaacattaagaaatcaatttagcaagttataaccaatattttgaaaatgaaataagatagaaaatgttaagatataccatagtttatgacagtatccatagttttgtaaatttttgtttcagttatatataggtcatgatgtaaatgacattttattatgaggtatgtcaaaaaaagtcttaaagcggccagatgtggtggctcacacctgtaatcccagcactttgggaggccaagatgggcagatcacctgagatcaggagtcaaaaccagctgggccaacatggtgaaacctcgtctttactaaacatacaaaaattagccaggtgtggtggtgtgtgcctgtaatcccagctactcaggaggctgaggcaggagaatcgcttgaacccgagaggtggaggttgcagtgagccaagatcaccccactgcactgtagcctgggcagcagagcaagactctgtctcaaaaaaaaaaaaaaaagccttaaagccacaactaatccttactccctcaccccctccactttataacctcactagacagcaaagacagccagttaagtacataaaccaacgattcttaaaagtgtctcaactgttggaaatttgatgaaagctatggaccttttcttgacaaaaatgtaccctcatacaaaattttcattccatacaggtttgggattcctaaactcctgccctgaattaggttaagacctctttctccagaaagaggactaaaaaagaagctgacctttggggaaggctcatataattgctgtcttagttctgaaacaaggcctttttccagatccagtctgcctactcaaataaaaattattttcttcattatataaaattgttgacaatgccaaattctcttttatttaaaaaatatatcatgtggccaggcgcagtggctcacacctgtaatcccagcactttgggagatgaagacgggcagatcacttaaggttcggagttcgagaacagctggccaacatggtgaaaccccgcctctactaaaactacaaaaattagccaggcatggtggcagacacctgtaatcccagctactggggaggctgaggaaggagaatagcttgaacccaggaagcggacgttgcagtgagccaagaatgcaccactgcgctccaggctgtggacaaagtaagactgtctctcaaaaaaaaaaaaaaaaaaaaaaaaaaaaaaatatatatatatatatatatatacacacacacacacatatatttttaaatatatatgtattttaaatacatatatatatcctatatatacactatacatataatgtattattcagcttttatttggagactcttgaaaatttttgcggaaggctcccaaactgtgccttatgttcctgaaaatgtggtaaagctaattacagctaatgtatttaagagtcagcctgggccaggagtggtggctcatgcctgtaatctcagccatttgggaggctgaggcgggagaatcccttgagtccaggagttcaaggccagcctgggcaatatgacgaaaccccatctctaccaaaaaaaaaaaagctggatgtggtagcacatgcccatggtcccagctacttgggaggctgaagtgggaggatcacttgagcccagaaggttgaggctgaagtgccactgtactccagcctggccaacagaatgagattttgtctcaaaaacaaaaacaaaaacaaaaaaagtcagcctgcatttcattcagaaattttttttttctttttattgagacggagtctcaatctgtcacccaggctggagtgcagtggcacgatctcagctcaatgcaacctctgcctcccgagttcaagctattctcctgcctcagccttccgagtagctgggattacagatgcatgccaccacacctggctgatttttgtatttttagtagagacggcgtttcaccatgttggccaggctggtctcaaactcctgatatcaggtgatccacctgcctcagcctcccaaagtgctgggattacaggcgtgagccactgtggccggcccagagatatttttctaaataaatacaacagattttaccaaatttagttagcatattctccttgaactcaaattacactgtattttccatgcaattctaataaagaggcagcaattagttttcatagccactgataaaagtatccaagcttttacaacatgtccttgcctctcaagtcatagtaagttcacttaaatgttttcaaagaggccgggtgcagtggctcatgcctgtaatcccagcactttgggaggccaaggcaggtggatcacgaggtcaggagttcaagaccagcctggtcaagatggtgaaaccccatctctactaaaaatgtaaaaattagccaggcctggtggcgggtgcctgtaatcccagctacttgggaggctgaggcagagaactgcttgaacctagaaggcagaggttgcagtgagccaagattgtaccattgtactccagcctgggtgacagagtgagactctgtctcaaaaaaaaaaaaaaaaaaagttttcaaagacaataagtgaatttgccttgttcactttgtcatttattttttaatggattttggttattaattcagtgattcataaaaggattacagaaaattttattttaaaaactattttaatttaccacaagttttaaattttaaaataacaagaacttgtgttccaaatagtgaaacagatgctgattattcaaagataaataagatttgtccctagctaagtggctattgacacctaaatatacaattacagtagtataataatctctgaaaacacaaaaaatataaacaaaaaaataaaaagataaaaaataaaaaagaaatttaaaaatttttttaaaaagaaaaaaaaacctctaggccaggtgtggtggttcacacctgtaatcccagcattctgggaggctgaggcaagaggatggcttgagcccaggagtttgagaccagcctggacaccatggcgaaaactgtctgaagacagtgggttgggccgggcatggcagctcacacctgtaatcacagcactttgggaggatgagacaggctgattgcttgaggtcaggagttcgagaccagcctggccaacatggtgaaacccagtctctactaaaaacacaaaaattagcggggcgtggtggtgtgcacctataatcccagctacctgggaggctgaggcaggagaatcgcttgaacccaggaggcagaggctgcaatgagctgagatcatgccattgcattccagcctgggtgacagagcgagactccttctcaaaaaaataaataaaaataaataaataaataaactaaaaaggcataacccacaaaaagaccaaaaaagaaattaaaaagtctgggtagacaacaagacaattttcttggaaagcagacagaagagcaataaatgactaggcaagcccaagaaaactgaatcatagcccaactgtggtaaacttacgatcaacacaatttatgtcatacgttccccaaaatgttcagaaagtggaggtgaaagagagctaaagaaaataaggaggattggttgaaattgtttccgaagcttcagatcattacattttctccccaactagtgaagtcaggtgcctgctgctctaccatcctgagactttaggtttattctctagagagggttaaacagagggtttctagattgggggataccagcaacagtaaggggcagggtacaatactgaaaataaataaattaagtcaatatattgagtaagattttccggtcctctttccctaatcgtcaccttcccggagagagattagaggatccttcttgcccaggctggagtccagtggcatgatctcggctcaccacaacctctgcctcccaggttcaagagattcttctgcctcagcctcccgagtagctgggactacaggcccgcaccaccattcccggctgatttttgtatttttagcagagacggggtctcaccatattggccaggctggcctcgaactcctgacctcgtgatccacctgcctcggcctcccaaagtgctgggattataggtgtgagccaccgtgcccagcctagaggatccttcttcggagaatctgaccagctcaaggagagaaaaataactaaagttactaacatcaacgtccctaattgagttgcccaaccagattacactgtagtaagctaaccacctctaatcagctttcaacacttcctcttaaatataaacagacaataaagattaccagatgtctgagaaaaacttcaacatgaaagactaaaaacaaataactacctgtagattaaaaaaatgcaacttgaagaaaagagattacagggaacaagaaaccattaaaaactacaggggtcgaggggaggggaaagcaacttcacctctgcggtattttcccaaaaaacccataaccctagtttaatcatgagaaaatatcagacaaatttgaattgagggacattctataaaatacttgatgagtactattcaaaatcatcaagccattacaaaaatggaaagactaagaaactatcacagatcaggggagattaatgagacatgaccactaaatacaatgtggtatcctacattaaatactggaatagaaaaacacatcactaaaaaagaaaagctacagaaggccagcatggtggctcatgcctgtaatctcaacactttgggaagcttaggcaggaggatcacttgaggttaggagtttcacattacaatgagctataatggagcccctgcactctggcctgggcgacagagagggaccctatctctagaggaaaaaaaacccaggaaatacagttttatagtttagttactattgtaccaatgttaatttcatagttttgactaaagtattatggttagccgggcatggaggcatgcacctgtaatctcagctacttgggaggctgaggcaggagaatcacttgaacccaggaggcggaggttgcagtgagccgagatcatgccactgcactccagcctgaccaacagagcaagactctctctcaaaaaaaaaaaaaaaagtattatggctatgtaagatattaacaattgcctacttgagggtagcagatgggaggagggaaacgataagaaaaaatatctattgagaccaggtgtggtggctcactcctgtaatcccagcactttgggaggccaaggcaggtaaatcacgaggtcaggagatcgagaccatcctggctaacacggtgaaacccagtctctactaaaaatacaaaaaaattagccgggcgtggtggcgggcgcctgtagtctcagctactcaggaggctgaggcaggagaatggcgtgaacctgaaaggtggagcttgcagtgagccgagatcacaccactgcactccagcctaggcgacagagcaagactccatctcaaaaaaaaaaaaaaaaaaaaaagatttgattgccctgctagattatggaattgcatggagcctgtagcccctttgttttggacaatttctcccatttggaatggctacatttacccaatgcctgtatttccattgtatctaggaagtaaataacttgcttttgattttacaggctcataggcagaagggacttgccttgtctcagatgagactctggactgtggacttctgagttaatgctgaaatgagttaagactttgagggactgttgggaaggcatgactggttttgaaatgtgagaacatgagatctgggaagggccagcggctgaatgatatggtctggctgtgtccccacccaaacctcctctttaatttccacgtgttgtgggagggacctggtgggaggtaatcgaatcctgggggtgggtctttcccatgctgttctcgtgttagtgaataagtctcacgagttctgatggttttaaaaacaggagtttccctgcacaagctctctctctgcctgcttccatccatgtaaaacatgacgtgctcctccttgccttccgccatgattgtgaggtctccctggccatatagcacagtaagtgcattaaacctctttcttttgtaaattgtccagtctcgagtatgtctttatcagcagtgtgaaaacagactaatacaagggctcaagtgatcctcctacctcagcctcctgagtagctgggactacgcacacactaccacacccagctagcttttttgtgatttttgtggagacggggttttgttatgttgcccaggctgatctcaacctcctgctcaagcgatcctccagcctcaacttcccaaaatgttaggactgcaggtgtgagtcacaacagctggtctgaaatatttttaaaataactattttaggccaggtgcggcggctcgcacctgtaatcccaacactttggaaggctgaggcaggagggtcgcttgagtccaggagttccagaccagcctgagcaacaaagcataacgccatccctacttacgtaaaaaaaaaaaaaagaaagaaagaaaaaaaattttttaacaagaaagaatttttaaaagctaaaaatatgatcacagcaatgaaacaactcagaagataaggttaaagaaaagctttcacaaatcagaataaaaagtcaaagagggccaggtgcggtggctcatgcctgtaatcctagcactttgggagggcaaggtgggaggatcacctgaggtcaggagttcaagaccagccttggccaacagggtgaaaccccaactatactaaaaatgcaaaaattagccaggtgtggtgctacacgcctgtaatcccagctacttgggaggctgaggcagcagaactgcttgaacccgggaggcagaggttgcagtacccaacctgggtgactgagtgagactctgtctctcaaaaaaaaaaaaaaaatttaaagtgatgaacaacaggagagaaaaagaagatgagagaacctgttcagaaggtccatatctaagtaacagaagctcccaaaagcaagaacaaaacaaagggcaaaaattttaatctgataatcatgccagattgccatggtcattgccagattaaaaaggcccaacaagtgcctaccataatgaataaaaagagacaccaaggcacatcactgaaatttcagaaactgaacacaagaaaagatcctacaagcttcctgagagaaaaaagttcacatacaaatgatcaagaatttgaatgcctttcagacttatcagaaataacaacagaagcttgaaggttattaaacaatgccttcaaaattctgaaggaaaattattttcaatctagaattttagacacaataggttgctgatcaattgtgaggacaggacatattttcagacagcaaaatctcaaaataattacctccgataatgatgcaattagaaaacataattcattttacaaacaccaatgctatacgggcgcggtaattccagcactttgggaggcagagacgggcggatcacgagatcaggagattgagaccacggtgaaaccccgtctctactaaaaatacaaaaaattagccgggggtggtggtgggcgcctgtaggcccagatactcaggaggctgaggcaggagaatggcgtgaacccaggaggcagagcttacagtgagccgagatcgcgccactgcactccagcctgggcgacagagtgagactccgtctcaaaaaaaaaaaaaaaacaccaatgcaataactgatgttggcaaatatcgtaaatatatgttaaaactattggataaagggttttcagaaaacaacatattctttattatttattattattattattttttgagatggagtctcgctctgttgcccagatgtgagtgcagtggcgtgatcgccgctcactgcaacctccacctcccagactcaagcaattatcgtgcctcagcctcccaagtaactgggattacaggcgtgtgccccaacacatggctaatttttatatttttagtagagatgaggttttgccacattggccaggctggtctcaaactcctgtcctcaagcaatccatctgcctcagcctcccagagcactgggattacaggcatgagccaccatgctcagtgaaaacaacatattcttacatatatatatatatataaaacatatatataatatatattatatatacatatatcttacatatagataagatatatcttacatatatattttacatatatacgtatataagatatatcttacatatatatatcttacatatgtgtgtgtgtgtgcgcgcgtgtgtgtgtgtatatatatatagctttttttttttttgagacagagtctcgctctgttgcccaggctggagtgcaatggccagatctcagctcactgcaacctccgcctcccaggttcaaacaattcttctgcctcagcatcccaagtagctgggattacaggtacccaccacttcacccagctagtttttttgtattttcaatagagacaggattgcaccacgttggccaggctggtctcgaacttctgacctcaagtgatccgcctgcctcagcctcccaaagtgctgggattacaggcatgagccactgcacctggccatattcttacatattaattacaaaagggaaaagtatctttacaatggagaaatctgatggataccatcttaactaagtattcaaactaaatatcaccaatattaggaaaaactgacatccttgtatgatgtgtgtgtggtttactctgtgtgtgcatcactggatgtgatgcaatagaagtatacaacaggctaggcacagtggctcacacctgtaatcccaacactttcggaggctgaggcattacgactgctcaggagttcaagaccaggctgggcaacaaagtgagactccgtctctataaaaaataaaaaaattaaaaatttgctaggcataatggcacgtgcctatggtcccagctacacagaaggctgatatgggcggactgcttgattccaggaggtcgaggctgcagtgagccataattgcaccactgtactccagcctgggcaacatagtgaacccgtctcaaaaaaagaaaaaaaaaaccaaaaaaaaaaacccagaaaaaattagctgggtgtggtggcacatgcctgtagtcccagctacttgggacccttaggtgggaagatcacctaagcccaggaggttgaggctgcagtgagccgtgactgtatcactgcattccagcatgggcaaaagagcgagaccctgtctcgaaaacaaaacaatgaacaaacaaaaaaatgtgtttcgggctgggcgtggtggttcgcacctgtaatcctagcactttgggaggccgaggcaggtagatcacctgagattgggagtttgagaacagcctgaccaacatggagaaaccctgtctctactaaaaatacaaaattatccgggcatggtggcgcatgcctgtaatcccagctactcgggaggctgaggcaggagaatcgcttgaacctgggaggcggaggttgtggtgagccaagatcaggccattgtactccaacgtacatggcccccttttgtgcttttaaaatgttgaaccaggccaggtgcagtggcccacgcctgtaatcccaacactctgggaggccgaggtgggcagatcacctgaggtcgggagttccggaccagcgtggccaacatggtaaaaccctgtctctattaaaaatacaaaaattagaggggcgtggtggagcgtggcgcatgcccataatcccagctactcgggaacctgaggcaggagaattgcttgaacctgggaggtggagattgcagtgcgctgagatcgcaccgctgcactccagcctgggcaacaaagcaagattgtctcaaaaataaaataaaataaaatataaaataaaatgttgaaacaggctgggtgcggtggctcacgcctgtaatcccagcactttgggaggccaagaccggaggatcacctgatgtcaggggttcaagaccagcctggccaatatggtaaaaccccatctctactaaaaatacaaaaaattagctgggcatggtggcacacgcctgtaattccagctacatgggaggctgaggcacgagaattgcttgaacccaggaggcagaggttgcagtgagtcaagatcctgccactgcactctagcctggggtgacaaagagtgagactctgtctcaaaaaataaataaacaaataaaataaaatgttgaaccacatgaatgtattgccaactgaagattttaagtaagtttaataaaaagctttcctcaattaattccatgctactctgatcccttatctcatatctgtcagaggatttagccagacaactgaaatgttattcacttatttctttaatatgtgttactatgtaattgactctgggttatctcctagatgaggctgggaaaagttatcctctcttccaaaaacaacaaaaaggagagaaatggaggtcttgctatgttaacgaggctggtcttgtactgctggcctcaagcaatcctcccatcttggcctcccaaagtgctaggattacagatgtgagccaccgtgcccagcctcttctaattgttttagatccaccaccctcaatgcctcacaatgctgtgtaaacaccaggctttcacaggctgcatttttttttttttttttttttgagacagagtcttgctctgtcacccaggctggagtgcagcggcgcaatctcggctcactgcaagctccgcctcccgggttcatgccattctcctgcctcagcctcccgagtagctgggactacaggcgcctgccaccacattcgtctttttagtagagacaaggcttcaccatgttacccaggatggtctcgatctcctgaccttgtgatctgcccacctcagcctcccaaagtgctgggattacaggggtgagccaccgttcctggccaggcttcatgttttatcagaattgcaacgaatatttgagttacaaaactaggagacataaactaagtcgttatttcaaacattatcctctagaaacatttaaaggcctccaggtaaaatgccattttgtgaattcagaaagttctaggatgaattaatttacgctcgtaatcttatttcatagagctgcatttagagaaaaccagagtctcaaggaaaagaactggctcatggctgtataatctcaacactttgggagcccgaggcaggaagatcgcttgagcccaggagtttgagaccagcctgggcaacatgacgcaaccccatctctaccaaaattaagaaaaaaaaaaatagccaggtatggtggtgtgtgtctgtagtccccgctacttgggaggctgaggtgagtggatcacttgagcctgacaggttgaggctgcagtgaggctacagtgagccatgactgtgccagcacactccagtgagggtgacagagtgagaccttatcaaaaaaaaaaaagaaaagaaatttcttccttaaggaaatactgcttattttttttgccttcaagtcctacggatgtgttaaggcattatactttatattacctaacagagatctatgctggagacatttacaggttaaagcaaaaattcctaattcctttgtagctacaacatcctatgcagttttagggaggcagttttaagttgaaaattatgaagaactcccaaaaatcagttgccccgtgatgccttaagccagatgtgcctatcgttggaaactttcaaacgtacatcagataaaatattctctcatattaagtggaaaactggaaaagaaaatcccttaggtactttccagtactaaatgttctattaagttattgaattttgagatagaatcaaagtaaaattaaacagcttgccttgccagggccaggaataccactaaatgctaaagcataaaacaggacccagcaattcattttcttgctgctaatctactgatattactcctaataaacttaaaaactaatcaagctcctatcaacctactattccaaatcttggcatgtgtgtaaaatatatacacaactaagaacagatttgaaaaatgcttataaaaaaagaagataggctgggcacggtggctcacaactgtaatcctagcactttgggaggccaaggctggcggatcacttgaggtcaggagttcaagaccagcctgaccaacacggtgaagccctgtctactaaaaatacaaaaattagccgagcatggtggtgtgcgcctataatcccagctaatcaggaggctgaggcaggagaatcacttgaacccaggagaaggaggttgcagtgagctgagatcacgtcactgtactccagcctaggcgacagagcaagactccgtctaaaaaaaaaaaaaaaaaaaaaaaaaaaagataattttacaggaacttcattaagagtattatactctatttctatcaaaggggataaccaaatattcataaatgaggccttatatttcttgagaaagactccccaaaactgagtctgtttttttaaacttcatgagttcattcggaattttccaactttgctgggcatggtggctcatacttgtaatcccaaaactctgggaggccaaggcaggaggattgcttgagcctaggagttcgaaaccagcctgagcattacactgagacctcatctctacagaaaattaaaaaattagctaggcatggtgacatgtgcctgcgatcccagctactcaggaggctgaagtgggaggatcgcttgactccaggaggtcaaggttgtagtgagccatgtttgcaccactgcactccagccgggatgacagagagagaccctgtctcaaaataaagaaaataatttatacaattttattctatctgaaataaccactccataaatagtactgccatgcaatttccagtcctgatgtcatggaatggtaaacattattgtggttccttatataaaacagcatgagtatggcatgctaaaaggatggaatgagtctaagtctcaacatcatcgaaaggcaagaccaactggggccaccaacctttaggcagggcactgaatagcccttgctgaagccacttttcacttgcctccttaaacatcctaagactagacagcccaatggtaacttgaaaaagtaacaaattagtaagagaactgcatcattagagaacacttaaatgagattggccagctaaactcataagaattaatgccatatcaatcagatttatacagtgtaagtgcaacatccttatgacactatttgtcatagtttcttacctgtttaatatcaccttcaaatagtccattagattcaagcgaatacagtactcattacagttttttaaaattaaagaaacaggctgagtgcaatggctcacacctataatcccaacactttgggaggctgaagtcggaggatcacttgaagccaggggttcgagaccagtctaggcagtaaagcgagacccccactccaccccacaaaaaaaatttaaaattagctgggcgcagtggtgtacacctgcagtcccagctactccagaaggtaaggtggaggactgcttgagcccaggttgaggctgcaatgagcaatgatcacgtcactgcactccatccggcctgggtgacacagcgagagaatctctaaaaaaataataaatcaaaaacacttaaaaataaaggccaggcacagtggctcatgcctgtaatcccagcactttgggaggccaaggcaggcagattacctgacgtcagttagagaacaacctggccaatatggtgaaaccccatctctattaatatacaaaaattagccaggcatggtggcatgcgcctgtaatcccacctacttgggaggctgaggcaggagaattgcttgaacccgggtggcggtggttgcagtgagccgagatcacaccactgcactccagcctgggtgacaaagtgagactccatctccaaaaaaataaataaatacataaaaaataaagtggccaggcgcagtggctcacacctgtaatcccagcactttgggaggccgaagtgggtggatcacaaggtcaggagttcaagaccaggctggccaacacagtgaatccccgtctctactaaaaatacaaaaatcagccaggtgtggtggcaggcgcctgtaatccgagctacacgggaggctgaggcaggagaatcgcttgcacatgggaggtggaggtcacagggagccaagatcacaccattgcactccagcctgggtgacagagtgagactctgtctcaaaaaaataaaataaaatagccaagcacggtggctcacgcccataatcccagcaatttgggaggctgaggtgggcagattatccgaggtcgggagttcgagaccagcctgaccaacatggagaaaccccatctctactaaaaatacaaaaaaattagccaggcgtggtggcacatgcctgtaatcccagctactcgaggggctgaggcaggagaatcgcttgaacccgggaggcggaggttgcggtgaaccgagattgtatcattgcactccagcctgggcaacaagagtgaaactctgtctcaaataaataaataaataaataaaatggaggccagatgcggtggctcacgcctgtaatcccaacactttgggaagatgaggagggcggaccacctgaggtcaggagtttatgaccagcctggccgacatgacgaaaccccatctctactaaaaatacaaaaaattagccgggcatggtggcgcacaccttgtagtctcagctactcaggggggtgaggcaggattgctagaacctgagaggtggaggttgcagtgagccgagatcgtgccactgcactccagcctgggcaaaagagcgagactccgactccaaaaaataataaaataaaattaaattgaaacaagcaaaaaaccagttaataatctgttaataatctgttaaagtagaagattaatggtaattatctcaatagttaataggaattttttagccaatgagtttctactgtttattcgcttttttgtaatcttactgttttacgggtttggaaagatacttgacacatagctcctataattattattattattatttttttgagacggagtctcactctgtcacccaggctggagtacagtggcgcaatctcagctcactgcaagctctgcctcccaggttcatgccattctcctgcctcagccttccgagtagctgggactgcaggtgcctaccaccacacccagctaattttttgtatttttagtagagacggggtttcactgtgttagccaggatggtgtcgatctccagaccttgtgattcgccagcctcgacctctcaaagtgctaggattacaggagtgagccaccgcgcccggcagcttctataattgttaatctttaagaacatgttagataatgagataacttttttttctgaattacaaaaggattctcttctcctcccacaattgaaaatactaatttctaatgcattattccacagtttgtattttaatttacttctttcctcaactaagactattaggatattagccatccaattaaaggaaaaaaagattttaaagaaagaaaaacactagccctaaacctgttaaaccagtccacgtgacaggtataaaaattttcctagtcattgactgcaaaggaaataatgttacatagtgatctacacctgaacctgttcacagcactttagagaggtcaacatcagatgagagagcgttctctgaggctggctttcacaataccaggtcttcagcattacctagtttttgaactataaattcactaagataaatgccaccatttcccaagacttcctttttaaaaagcaatttaatcttatgcttgatgtatttctattatgcactggtaaatcaaaacaaaacaagcctggcgtggtggctcatgcctataatcccagcactttgggaggccgaggagggtggatcacctgaggtcaggagttggagaccagcctggccaacatggtgaaaccctgtctctaccgaaaatacaaaaattagccaggcgtagtggcgcacgcgtgtaatcccagctactcgggaggctgaggcatgagaatctcttgaaaccaggagacgaaggttgcagtgagccaagatcgcaccattgcactccagtctgggtgacagagcaagactccatctcaaacaaacaaacaaaacaacaacaacaaaattctacaacactagtaaacacagatggcttcataaattaatactttacctttggcatctttcatatgcccactttaaaatgtttaatattcttgggttcacatcagtcctcctgttatgcattcagttttactgagaaatgaagaaactgaggcaagagaagtgggaaaaaacttgctatttgtagcaagcaggcatctatctggacaggtaaactgtggtcctgctctattaggccacaatgcttttctgaaaagtgcctgtcaaataagcaccacagaaatccttctcatcacagacatccagggcatccccctcaagaagggacaaatatgagtattcttccctgctgagtgagaaaagaccatgtaaccaaagaaagcatgcttctcaatctatactaccgaattgggagggaaaaaatgaatggaaagagagagaaaatccaaggaaataaacttctgagactgaagatgtggttattaggtttatccacacattaggaaattactgaaacatcgcttaagtagaaacagaatcaggaaggcctagggtctttttttttattccagtcttaaacctccaaacaaaaatatctgaaattaaactatttctcctgagcagttatattcttaaatgtctctatagaacccacaaggcctacacgaagtccctgatttttagaggtgatttcaagtgtccattagtgtccactctcccactctcaaatccaaaataatgttggccccgatccgggcaggaccttcacgcacattttcctgtgaaatcattagcttcacatcagcttcctacgtcctatttccagtaacttcccttgatcagcatggcaaacgaggagagtaacaaaaggcatgtacatttactatgtccctcgcagagaacataataaaatcctgggaacaggaactggcagatacaacctgcctggccctggctctcgccacgatacaaaggcacggagagagcaagtgaggtctgcaccccacacctcactctgcaagagagaaaggactttcaatgcaatcagacccaacccgcaacgcccccttcccacgtggtcttctccctctcccgagcccagaatcggattggagaggggtctggaaggaatcagaccacgctggagctgggcaagaggggtggcgggcgagctccaggcagaaactccagccccccttcctagaggagccctgaactgtacgcctcccagttccgggatctgaatccccacctcccgagaccccagacctctccatgtctctagggaggggacctcaaggcctcagagctgcgggaagggctgggctgccccgcacccgatctggatagtgtggagcccaggccgcgtgcgggtgagcggaggctgggaggcggccccctgcctgccgccgcccctcccttggccccagtttctccaggtccccggtcacaggttctgggccggccctcacctcacctcagggtggcaacgtgtgcggtcgggcgattccggagcccctgcgtggaggaactgctgggcgggaggagacgccggcggctcgggcgatggctgacaggcgtgcagcaccaggccggcccggcacacggagaaggggcggggcttcaggggcctgacccgcccccgccccgcccctgtctcccacctcagccggcgagctccatgaggtgactacgtccggggttactccaggccgttcacctccgaccccgctccgggctgcggcgctgccagggccgccggggggcgaggcgcgggcccgagggctcagcggcagccaatgggagggcggcgcggggcggagcgatgtgaggcgatgccgatggtccgagcgcggatctgccattcggggcccagcggctagagggcgggcgggccgcgggcgggccgcgggcgggccctgggcagtcgtggcgcccctggcccggccttcgcggccccttctgccacagccgggtacggggccaacccctcggctcctcctcctggcggagaggggagtgggggaagcggtcccgcatgcgcctcgcatcagggacagaggcgtcccaagtgaggggccaggactagccggcctgtagaggcggggaaagggaacccagaattaaggcgggctagaatggggcaggcggtgtgcgggcccgtttgtctgtttaatcctaacacattaacaaggggtgggcaatcgcgtccactacctgtcctcatcacgctggctggtttccaagtctgggcgagctaagtaaccccatgctggaactccataaccagccccccgtttcgctcctcagccccgagacagcccactccaaaggtgttatacatgctggatcctggcgtgttgaggagaagcctcagtaaacgaagctcagtaagaaggggaatgtaccaaagaaccaccgtcttctgcctgccctgagcaaaatagttgccacagcgttccagacttttcggattggagaatgcttcccgtcctccactgtgggcacgccgagcctttgagaggaagccagtcggtgtctctagttttgccagttacttcatagcaagactttcatggtagctgtgtgttgaaaattaataataactggaaggggtcccaacacaatacaaacattgcgtagggaagaaacttggagaaaattgcacttgagaagaacagggtgaactcagcccttccaaggaggaatttaatgaagcatgcagcgcaccttcttaatgcttacaaacttgtgaggaaggccaggagaggtgcagaggatgacagtttggtaggaagaagttccacgccagagagtaaaaagtgaataggatagaaatacatgcccaggtaagaagttcttggcggaagctgaggcagaaagagggaaagattggtcaacaaggaacaatatttatctaggagccctcataatcccactaagtggggcttccctaagaatttatcaacccatttttaaaataatagggtcaagcacagtggcacgtacctggactgtagtcccacctactcagaaggctgaggtgggtggatggcttgaggcgaggagttcaagtctatatgtagtgtactgtgcctgcgcctgtgaatagccactgcaccccagcactggcaacgtaaaaagaccccatctctaaataaataagttaattaaataacagggattggaagcagagaacttaggaaagatgtggactttacagaacagggattcatatttcacaataattatatcactaatatatcaatcagttggacaaatgtagtgggaggaaaaagataattgggcaagacttcctggtttagtaagatgtttgatttgactcaccgaaaaaaatggcctgggaagagggaagccttgcctttccataacagcagtctctgaagctgacatgaagggagtgacttcaaaagaactaaaaaccatgcggttgcctcttacttttcttttacctttcctagatcctcttaagtaataggaattctttccccaggattcttttttttttttttttgagatggagtctcgctctgtcgcccaggctggagtgccgtggtgcaatctcagctcactgcaacctccacctcccaggttcaagccattctcctgcctcagcctcccgaatagctgggactccaggcacaaaccaccaagtccagctaatttttgtatttttagtagagacggggtttcaccatgttggccaggatggtctcgatctcttgacctcgtgatccgcccaccttagcctcccaaagtgctggccgcaaatgtgagccaccacgccaagtctccccaggattcttaatggtgttgctgtttaccagctttacaagctctgcaaaaccagggatttaccctcaaaaactgtccttatgtgaaatttcagccagcccctgcatgtcctgcttttgacttcactgattattttaaataattgagctttctaaagaactggccaaagaaagtcctaatagaagctacagtgaaaaaaaaagtaattaaggaaggatgagttacgataccaaggtcacttacagaggatctaataatctaattgttatcaccaaatgctaagacagctgggcagagaatgagcaaagagctgtgtctttaagacagtacaactggaatttcagcaacccctgagtgttacggtgtttggtgcatgccacaacctgcccatccctactgtaggttctttagagctgctccatgagttattgctacacaagctattacgtctgtaagaggcggaggaggagaaccaaagggtggagagaacttactatatgagactaacaaatggaagagaaggatgagtggtacatttctagaagctgatactagaggtctgttatgggctgaattgtatcccaaaattcatttgttgaagtcctaacccctaatacctcagaatgtgagtatatttggagacaaagtctttatagaggtaattaaattaaaatgaggtcataagggtgggccctaatccagtatgactgtcgtccttataagacgaggcgacgaggacacagacacacatatgaagacatagggcatgcatggccatgtacaaaccaaggagaaaatatcagaaaaaaactaactgctgacaccttaatcttggacttctagccttcagaactgaggaaatgcatttctgttgtttaagccaccagtttgtggtactttgctataacagccctagaaaacgaatacaaaatcccaaatatatgacttccagggttttcaaggtgatgtaaaggtattagggactcatcctgagcatcccagctaccttccaaccttaaagttgctttcttatcttcctgtgggtaaagtcagaaaagtatgagaggtccctgtcttcaaggtgattatagtctatttaagaagacaaaactagcacattaaaacagagtgtctgtgtcacactctttagatgatagccatatgaatttgtaatagccatagatgagaaaagataaattctcaaaaattgataaacccagatatatataaacattatatgcgccactgtccagacagcttcatttggcatttttcggtcaaatatttagattagggcatcgtttctcaaagcatgtcccactaaccacctgatgaaacaaacactagggtgcgccaggcgcggtggctcacgcctgtaatcccagcactttgggaggccgaggcgaggcgggtggatcacgaggtcaggatatcgagaccatcctggctaatgtggtgaaaccccgtctctactaaaaacgcaaaaaattagccagatgtggtggcgggcgcctgtagtccccgctactccggaggctgaggcaggaaaatggcgcgaacccgggaggcggagcttgcagtaagctgagatcgcgccactgcactccagcctggcgacagagcgagactccgtctcaaaaaaaaaaaaaaaaacaaaaccaccagggtgcttgttaaaaatgcagattcccagcccttttttttttttttaatcacaactactcactgcagcctcaactcctgggctcaagcgatcctgccacctcagcctctcaagtagctgggactacagggacatgccaccacacctggttgactttttcttttctctttctctttttctttttttttttttttttttttttgagacggtctcgctctgtcacccaggctggagtgcagtggcacgatctcggctcactgcaacctccacctcccgggttcaagcgattcttctgcctcagcctctcaagtagctgggattactggcgcgtgccaccatgcccagctaatttttgtatttttaggagagacgcggcttcaccatgttggtcaggctggtcttaaactcctgaccttgtgatccacccgccttggcctcccaaagtgctgggattacaggcgtgagccactggacctggccgactttttctttttttaaagcatccctaataattaatcaccctaaagtttgagaacagtcgtttaagatttatcattattgttcccctctttgtgtgccagagtctctgttgaacaacaaggccttcaatacctgtcactcttaggacaagaaagtctctcaagtcaggtttgagttgaatcaagggaggaaacaaagtgccttaatagaaaatagaaccatgggctgggtatggtggctcacgcctgtaatcccagcactttgggaacacaaggcgggtggatcacccgaggtcaggagttctagaccagcctggccaacatagtgaaaccctgtctctaataaaaatacaaaatttgcggcagggcacggtggctcatgcctgtaaacccagcacttcgggaggacgaggcgggtggatcacctgagatcaggagttcaagactagcctggccaatatggtgaaaccctgtctgtactaaaaatacaaaaaattagctgggcatggtggcaggcgcctgtaatcccagctactcaggaggtgaggcaggagaattgtttgaacccaggaggcagaggttgcagtgagccgagatcgtgccactgcactctagcctgggtgacagagtgagactctgtcaaaaaaataaaaataaaaaataaaaaaattgctgggtatggtggcacgtgcctgtagtctcagctacttgggagactgaggcagcagaatcacttgaacccaggagacagaggttgcagtgagccgagattgcaccactgtactccagcctgagcaacaaagcaagactccatctcaaaaaaaagaaaagagtccagccatggtggctcatgcctgtaatcccaaaactttgggaggccaagacgggcggatcacctgaggtcaggagttcgagaccaggctggccaacgtggcaaaatcccatgtctagtaaaagtacaaaaatcagcctggcatggtggcgggcacctataatcccagctacttacgaggctgaggcaggagaatcgcttgaacccgagaggcagaggttgtagtgagccaacaggccactgcactccagcctgggagacagagagagactccgtctcaaaaaaaaaaaaaaagaaaaagaaaagaaaatagaaccatgaagagccccccctgtcctggggctgtctgaccatgaatccaaattcgtagataacaaggtcagtgatcaatttttaggacagagaatagaggaattattgggatattatttcctgctgaccaccaatagtcatactttaatctggcttctggcacttgccatgcttattcttatccttatacctttgtttatggtggcagacttgtccaacttttctcctgtttttctgaatctttctagtccttggaagtcccattttctccaagatttctcttacttctccagctttcactgatctctctctcctttgaattcttgtagcaatatggtcataccacacagttcagaattttttttctgagacagagtctcgctctgtctcccaggctgtagttcagtagcgtgctgtcagatcactgcaacctccgcctcccgggttcaagtgattctcctgcctcagcctcccgagtagctggaatcacatgcccagccaatttttgtatttccggcagagacagagtctcactatattggccaggctggtctcaaacacctgacctcaaatgatcctcccacctctgcctcccaaaatgctgggattacaggtgtgagccaccatgcctggcccacagttcagaatttaattaggatatatttttttgtctgcatactggttttagctctccagttaaatcctgaaggcagagaccatctcttatagtttgctacccccttttatagctcttcaagtaggactaggtatttctattagtaagcgcttcattgactgaaataaagattagctctgtacctgagaggccactctgctcctgatgcctgcttatccgtcttcacgttgtctctgagaggcaaagcctccagtgggatatatagctgctttacagatggacagaattcatcaagaaagtcagtgccttgcccacaactgtggctccagttgtgatataaaagaaaaataagacacaaagtccttatctgaatactatgtctctttgctcttgttaatcactccagtttatccagaattaagagcctgaaggaacttcataccataaggtcagaaaatctcctcaggaaggccacttcataagtctggtcctaatgatgaaaggtagaattgcacaatgaaggacagcatgagtagtagagactccccacgatgttttcacatggacacagggttttcacatggcatttctgctctcactccttccttatccaatggcaaacacttccagtctctatacttcagccagttaccaaatcttaacttcttcctccatgacacctccaatatatatgtttttaagatccctttctaagtcctacacacctcacaactaaaatacctggagaaattttaaagggctctttaaaaacaggaaaatggacaagatgacttgtttggattttgcccagtcgtaggattctgacattttatgttgatcagctttatagcctagccatccctgacttcactttcctctaaagccatgacggtgctcctggtaagttgatttcctgccccatccctaccttctctttagacttccctagtgtctccatcattcctatatcaggttcaggtttttcctgctacatatttaggcctctacctgtcttctaccttcactctctattgttgttattatatatgaaacacaatacataataaaatataacattaataattttgtagagcctttatcgtcaagaaaaattgagccatcattcaatttctttttatccttttaataccttgtcttaaaattttcctgtatgtgatatcttagagcagaagatttcacaatgtcatgtctttttttttttttttgagacggagtctcactctgtcacccaggctggagtgcagtggcacgatatcagctcactgcaacctctgcctcccgggttcaagcaattctcctgcctcagcctcccaagtagctgggattacaggcacctgccaccacgcctggctaatttttgtatatttagtagagacagggtttcaccattttggccaggctgatctggaattcctaaccttgtgatccacccgccttagcctcccaaagtgctgggattacacacgtgagccactgcacctggccacaatgtcacgtctttttaaaaaaaaaatctcacctctgggccaggtgtggtggctcatgcctgtaatcccagcactttgggaggccaaggcaatagggttacctgaggtcaggagtttgtgaccagcatgaccaacatagagaaaccctgtctctactaaaagtacaaaaattacctgggtgttgtggcaggcacctataatcccagctactcaggaggctgaggcaggagaatccgttgaatccgggaggcggaggttgcagtgagccaagatcatgccattgcactccagcctgagtgacagagcaagactgcgtctcagaaaaaaatatatatatatatatcatctcacctctggttaactcctagacctgcaggtagaaagttattttccaacacaagtcttgtttatcagtggacctattgtgctgatgtgcccaattttcttattggaaaaagaaaaaaaaaaaaagaagaaagaataaagacaacaaaaaatccatgaaaaggaaatgtagcttcaatcaatgaacaagatggtcataatcagttgaataacatagttttgggggtgaatacaggcaagcaaaactgagaagaaccgattcttggtattggcagtgtcagtctcaagagcggcagcaactctaccttctctgtgctctgtattataaacagcttgagctctttaatcaggctatgctttaaatcctgactctgtcgctaattagctctgtggccttgaggaactgacacctttctgagcctcagtttccttatctatattatatatatctatcttatattcaggatataaagcctaccttctaaggtggtgttttggattaaatgatgtaaccaacatgttaagcttctggcacagagcttgttagatagtaggcacacagaaaatattactttcccctttctctccatgttcctttcctttcatttcctattagtaatcgatacagaacagaatgctttatggatcctcaattaattcagaaattgtgattgctgggcacagtggtttatgcttgcaatcccaacactgtgagaggccaaggtgggtggatcacctgaggtcaggagttcaagatgaacctggccaacatgatgaaaccccgtctctaccaaaaatacaaaattagccgggtgtggtggcacacacctatagtcctagctacttgggaggctgagaaaggagaattgcttgaacccgggaggcggaggttgcagtgagccgagatcacaccactgcactccagcctgggcaagacagagtgagactccgtctcaaacaaacaaacaaacaaaaaattgtgtcattactaaattcactgcctcctgcacccaccatgagcaacagagtggaggccctgtcttagctatgagggaggctgaggaaggagaatcacttgaacccgaggggcggaggttgcagtgagccgtgtttgcaccactgcactccagcctgggtgacagagcgagactccgtctcaaaaaataaataaataaaaaattcagtggctgggcactgtggttcacacctataatcccagaactttgggaggccaaggtgggtgaatcacctgaggtcaggagttcaagaccagcctggccaacatggtgaaaccctgtctctactaaaaatacaaaaattagctgggcatggtggcgggaacctgtaatcccagctactcgggaagctgaaggaggagaatcacttgatcccaggtggtggtggttgcagtgagccaaaattgcgccattgcactccagcctgggtgacaagagcaagactccatctaaaaaaataataataataaaatgaaaattcagttcaccaacccatccgccccaatatttccaggttaatggagcatgtgatcagggaccttgggatattatgaatcctttacccttacttggaaggagcaaatgactgtggcctgagcttctgagtaccaaccaaagggctggcacgtgtgagtatgcctggccccactcaggcttattattgcatcacacaggaaagattctttggcccctttggcaagcatgtgtaatagtaggaacctgcatatattacaagtaggagtgtaatgaggacaatcccttagaaaacagtttggcattaattggtaaagttgtacataccctacataccctataaccagcgtctacttctggatttataccctggagaaactttcaaaactgccccagaaacattgctcattatggctacaaactggaaacaacacaaatgtctctcaacaggagaatgaatatataaattgtgatacattcatacaatgaaatattataaagcaatgagaatgaacagatgattgctacatgaagaaatacggatggattttaccaacataatgttgagcaaaaaatgtatgtttcctgctacaaaaacaggcaaaacaggccaggtaccagtggctcatgcctataattctagcactttgagaggctaaagcaggaggatcacttgaggccaggagttcgcgaccagcctgggcagcatagggagaccctatctcacaaaaattataaacaatttagctgggcaagtgatacacgcctgtagtcccagctacttgggtggctgaggtgggaggattgcttgagcccaggagttggaggcttcagtgagtcttgatcacacaattccactccaggctgggtgacatagcaagaccctgtcaaaataaaacaacaacaaaaaaatgggcaaaacaagccaggtgcatgcccctgtagtctcagctagtcaggaagctgagatggtaggatcacttgagcctaggagttcaaatctggcctgggcaacacacagagagagagagaccccatttctagaaaaaaaaaaataggcaaaactcatttgtgatggcaagaatctggataatacattcttttttttgttttgtttttgagatggagtcttgctctgtaactgcaggctggagggcagtggtgcaatcttggctcactgcaacctccacctcccaggttcaagcaattctcctgcctcagcttcccgagtagctgagattacaggtgcgtaccaccacacccatctaatttttgtatttttagtagagacgaggtttcaccacgttggccaggctggtctccaactcctgacctcaggtgatctgccctccttggcctcccaaagtgctgggattacaggcgtgagccactgcgcctggcccctccttttttttttttttttgagacagagtctcactctgtcaccaaggctggagtgcagtggcccaatctcggctctgcaacctctgcctcctgggttcaagcgattctcctgcctcagactcctgagtagctgcactacaggcatgagccaccatgcccatctaatttttgtatatttagtagagacggtgtttcaccatgttggccaggctgatcttgaactcctgagctcaggtgatccacctgcctcagcttcccaaagtactgggaatacaggtgtgagccacagtgtccagctgataatatttacttttgatggtgaggagtgactgggagaacacataaaagaaatttccagcccagacgcggtggctcacgcctgtaatcctagcactttgggaggccaaggcaggcggattgcctgagctcagtagttcaagaccagcctgggcaacacggtgaaaactagtctctactaaaaaaaaaaaaaaaaaaaaaaattagccgggcatggtggtgtgtgcctgtagtctcaactacttgggaggctgaggcagaagaattgcttgaacccgggaggtggacgttgcagtgagccgagattgtgccactgcactccagcctgggtgacagagctagactctgtctccaaaaataatgtaaataaataaataaataaataaataaaaattaggccaggtacggtgactcatccctgtaatccctgcactttgggaggctgaggtgggcggatcaccctgaggtcaggagttcgagaccaggccggccaacatggcgaaaccccgtctctactaaaaatacaaaaattagccggacttggtggcacatgcctgtaatcccagctgcttggaaggctgaggcaggagaatcgcctgaacctgggaggcagaggttgtagtgaactgagattatgccactgcactccagcttgggcaacagagcaagactccatctcaaaaaaaaaaaaatacatagagtttgattccatttatataacattcaaaagtaaacaaaatatttttagtgatacatatatagagagttcaatttttttgtttgtttgtttttgagatggaatttcactcttgttgcccaggctggagtgcaatgtcacgatctcggctcactgcaacctccacctcccgcgttcaagtgattctcctgcctcagccccccgagtagctgggattacaggcatctgccaccatgcctggctaattttgtatttttagtagagacagggtttctccatgttggtcaggcgtgtcttgaactcctgacctcaggtgatccacctaactcagcctcccaaagtgctgggatacacgcatgagccacgacgcccggctgatagttcaatgattttacaaaacatggaaaaataaagattgggaggaggaaagagaccggaggaccagaggcacagacatgtaaagagcatccatgatgctggcaatgttcaatttcttaatttgggtgatggtaacatatgttcaccttttcagtattattattattattgaaaatatacttatgttctatatactctcctgtatatatggtatattccacaattaaaaaacggccgcggccaggccgagtagctcacgcctgtaatcccagcactttgggaggctgaggcgggtggaccacttgaggtcaggagtttgagaccagcctgaccaacatggtgaaaccccgtctctactaaaaatacaaaaattagccaggcgtggtgatgggcgcttgtaatcccacctattcgggaggctgaggcaggagaatggcttgaacctgggaggcggaggttgcagtgagctgagatcacgccaccgtactccagcctgggggacacagcgagactacgtctcaaaaaaaaataaaggaaaagaaataaagaaataaaatggccatgctggtggctgatccctatgatcccagcactttgagaggctggggtgggagggctgcttgagccaggagttcaagaccagcttcggcaacatactgagaccctgcctccattattaaattttttaaatttaaaaacaaaccaaaacaaatgaacaaaatggcatgcagcctttaaaaagcagtagcataagccagacgcagtagttcacgcctgtaatcccagcactttgggaggccaaggcaggtggatcacgaggtcaggagatcaagaccatcctggctaacacggtgaaaccccatctctactaaaaatacaaaaaattagccaagcgtggtggcgggcacctgtagtcccagctacttgggaggctgaggcaggagaatggtgtgaacccaggaggcggagcttgcagtgagccgagatcgcgccactgcactccagcctgggcgacagagcgagactctgtctcgaaaaaaaaaaaaaaaaagagtagcatagtgtgcaggtacaataattttaaagctagaagaggccttgtaagccattttgtctaaccacctcattacagaaaccgaaatagaggccaagagaagacaagtgacctgttcaaattgatttagtcaattaaagagcctagggtaggcctcctggcttcctgtcaagtgctccttctgcagacccatcctgattcatccatttggtcctagttcctactctcttccaacgccatatctctgaactgcatatgtcataaaactcataacttttttcctgctaaatttgatgtttttgttgtgggaaaaggagatcagaagagatatactctgctccactgatattccaaatgcttagaaagtcagtcaaaatatctaggagtagagaaatagtctattagaaataatagaaacatggatctatttgtctacacttggattttttttttttttggtgggggaggatggagtctcgcactgtcacccaggctggagtgcagtggtgcaatctcggctcactgcaacctccgcctcccgggttcaagtgattctcttgcctcagcctcccaagtagctgggactataggcatgtgccacgacgcccagataatttttgtatttttggtggagatggggtttcaccatgttggccaggctggtcttgaactcctgacctcgtgatccacctgactcagcctcccaaagtgctgggattatgggcgtgagccacggtgcccggcctactcctggatattttgactgcagctcttccaccgctctgcccccgacagtatggcctactccaatatgcaggctgacttttttttttaaatggagtcttgctctgtcgcttaggatggagagcagtggtgtgctgttggctcaccacaacctctgcttcctgagttcaaatgattctcctgtctcagcctcccaagtagctgggattagagacatgcgctaccactcctggctaattttgtatttttagtagagacagggtttaaccttgttagtcaagctggtcttgaactcctgacctcaagtgtccacccgccttggcctcccaacgtgctgggattacaggtgtgaactaccgtgcctggcccaggctgactttagagtctttaagttacaaaagaaaagggtagggtctgcgaggtgatcaaagaaaactcttagacttcatctttcgccaagcacaaggtctcttttgggaaaagtgagctcttttgccaccttgtgacactggatgagaacagcaagccctcagatcaattcctactcctgctccaaggtggcagcattgtaccgtggcatctaggaactaatgtacagagagtttcaaatagagcaacaggagggaaggtgataatacctcaggggagcagagaatcatgtcatcatgttaaggaaatagtaagcaaaaatcacaaaacccaaggaaggcaatggagcccctctgccctaaccacctcctctgctaagagaagcaggcagccagaggcaagagggtggggaggatgaataaagatttccttggaccaataaagatgtgaggcatttatgttccctctagtcagtggcctcatttctctgctttctttctcatagcaaaacttttttaaaaagttttctagtctgggtgcagtggctcacacctgtaaccccagcaatttgggaggccaaggtgggcagattactggagctcaggagtttgagaccaacctgggcaacacagtgagactgtgtctctacaaaacatagcccatctccaaaataaaacaagaccaaagaagctgtagagtttgataaagatggggtagatctttattctcttttttttcttttcttttttttttttttgagacggagtttcgctcttgttgcccaggctggagtgcaatggtgcaatctcggctcactgcaacctccacctcccaggttcaagcgattctcctacctcagcctcccaagtagctgggattacaaacatgcgccaccatgcccagctaatttttgtactttcagtagagatggagtttctccatgttggtcaggctggtctcgaactcccgacctcaggtcatccacccgcctcagccacccaaagtgctgggattacaggcgtgagccaccgcgcccggcccttcattctcttttatgctccatctatctatgccatgacaaagtctacagattattacactagacactaaaaaaatacaaatttggaaaaatcttcaacaacagttatctgtctaggaaaaccttcccaagccacagacagtaccactcacctgccgtatttagctcttcctcacaacctctcagcccaatggtcatcagaatgttgtccaccaatactcacttcactattcaggagtgtgaagatgtgcaaaactcaataggtatgtctgtgctaatgtgagtttatatatataactggattaattctagagatcatatggttcacggccggctggggtggctcacggctgtaatcccagcactttgggaggccgatgggggcagatcacttgaggtcaggagttcgagaccagcctggccaacatggtgaaacctgtctctactaaaaatataaaaattagccggcagggtggcacacacatttaatcccagctattcaggagactgaggcaggagaatcacttgaacccaggagatgaaggttgcagtgagccaagattatgccactgcactccagcctgggcaacagaacgagactccatttcacaaaaaaaaaggccaggcacggtggctcatgcctgtaatcccagcacttcgggaggccgaggcaggtggatcacgagatcaggagattaagaccatcctgtctaacacggtgaaacgctgtctctactaaaaatacaaaaacattagccaggcatggtagtgggcgcctgtagtcccacctactcaggaggctgaggcaggagaatggcgtgaacctgggagacagagcttgcagtgagccgagatcgtgtcactacactccagcctgggcgaccgagcgagactctgcctcaaaaaaaaaagagatcatatggttcaggactctcaatttatagaagagaacatttagatcccaagaagtcaagtaattttctcaaggtgatagctcataaaagggcctgtactagaactcaattgtactgactcctagtcctagtttcctgctctatttctataattcctgctctagaaattatattccttactagaaatctccacatcttttcatgaaagtatataaatctctgtgcctgtgtcagtgagcatgcatgtaaatgtctacgtgtctatctgcaagtatttgtaaagcatatcaatgggcgtttatggccttcctgctcgagaaacctctaggtaatctagttctctatgtcggcaccggcagcgaagtcagaagaagtctgagtgaattattaataagcagaattagccctttctccaattagatctattcctgggtcttcaggaaatggggcaaaataatcagggtggaatcagagtctctcagggtcaaacttggttccagctgcgtgtggtgaaagcaactagaggcagagctatcaagggctgtgacagatgagcagtggtctgtctgcaatgagcatgtgctcaagctaacatggataccatcttggtcttcagcctaatcattgcatcctatgatgccaacaagaaaggtatgtaattctctagcctaatctcctggaaaatacagagagaggcctagaaagagtttcggggtctcttccaccagatagagatgtagctgatatccagcaagcaatactttccagagttaatcccatgtatccactcgcctctaagaaggactgcaacttattcattccagagagatagctgtctgtttcatgatgagaggtcttcagagaatgtgatgcattcttatgtcttgttcatgtaattaacattaaaagtcctttcactgttggatggctttctttagagtttcagtattgtcatcacctaaggttcccaaattcatactgttcataagatgttgccttttttaagttggtacatgtaaatagctagacggtgatattcttgggtggggagagctgagggaaagggtgatattgggtggaatggcatcatttgctgctctttggtaactgcttatttaaaatatgagttttcaaagtttcataaacatttcatctctaaaattagctaatcaaggctgggcacggtggctcatgactgtaatcccagcactttgggaggccaagattggtggatcacctgaggtcaggagttcgagaccagcctggccaacatggcgaaaccccatctctactaaaagtgcaaaaattagccaggcatggtggcatgcacctgtaatctcagctactcgggtggctgaggcataagaatcacttaaacctgggaggtgaggttgcaatgagctgagatcgtaccactgaaatccagcctaggtaacagaatgagactctgtctcaaaaaataaaaaattaaaataaaaaaataaaattagctaatcagaattaagaccaaatggcacaaagtgcagcagtaacgaatttgacaaattataaaaatgtcacaaccctttgaattatgtgccaaaaagcataaataactaagacctatggttctgtggaaacctatagagataccaaggtcagacaatataaatctccaaaagctttatttaatacaagaaagaagacagaataggagggagaagagaaaataagcagtatttaaggaaatgggttggttagactttcattaacttagtaaattttcttaactctatttgacctttctttgtcctaagggtaatagattggtacacagtattctttatactaggtcaactactactttgtatgtatttggctgggtgttcttttttgagggccgggcgtggtggctcacacctgtcatcctagcacttttgggaggccaaggcaggtggatcacctgaagtaaggagtttgagaccagcatagccaaaatggcgaaaccccatctctactaaaaatacaaaaattagctgggcatggtggtgcatgcccgtaatcccagctactcgggaggctgaggcagaagaatcccttgaacccaggaggtgaatgttgcaatgagcggagatcacgtcactgcactccatcctgggcgacagagtgagactccgtctcaataaataaataaataaataaataaataaataaataaataaataaaagtaaagtctttttagagagtgtttgatctcccaagttgcaagttttatgagcaggaactgcaatctttcatatcttctccattgcccagaattctaaaaagtaagtaccagtaaattctgattttccccaaaccttccccggttcccctcctccccctctgctcacccccagacctcagagatagcagttgccgactggaacagctgcctgggatcttcccaaaagacgtgagaagcatcagagaattgcaaatgcaaggtagggaatgggtcctttctggaaaatgatattgccattccaaaaaatttttacctttaaaagatatctcatcttcccacttcctagcccatatctcaaatatcctattttaaggatatgtatcctcccagggggctttctggaaaccaatctttaaattaactgtcattacctaaggcatgcttatattactcaaatggatggagatgaaaaaagagaaggaggcagaacctacccctctctgcattaaagaaaaatctatgagcatttctctgtgctaaatttactgctgtcaccaaccttcatgggaaccatggcagaagaaaggcaggacttgtctattagtactatgaacacaaactgaagaagttaactaaaaggagagaaagtacagcagtggagtttagcaggggtcatgaatggaaatgggttagcttggcactgttcagattaaaaaccagctttggccaggcatggtggctcacacctgtaatcccagcactttgggaggccaaggcaggtggatcacttgagcttacgagtttgagactagcctgaccaacatagtgaaaccccatctctactaaagatacaaaaatcagctggatgtggtggtgcacgcctgtaaccccagctacctgggaggctgaggcaggagaatcacttgaaccagagaggcggaggttgcagtgagctgagattgcgccattgcactccagcctgagcaacaagagcaaaactctgggcaacaagagcaaaactcagagatcgtgccattgcactctagcctggaccacaagagcaaacgcttcaaggtcgggtgcggtggctcatgtctgtaatcccagcactttgggaggccaaggtgggaggattgcttgagcccaggagttcgagaccagcttgggcaacacagcaagaccctgtcttttaaaaaattaaaaaattagccgagcaaagtggcatacacctgtagtcccatagtcacagctactcaggaggctgaggtgggaggattgcttggagatcgagggagtttgaggctggagtgagccatgattgcgacactgcactccagcttgggtgacagagcaaggcaccgtctcaaaaaaaccaaccaaacaaaaaacaaaaccagctccatttttctatctggttcttctccttccagaaactcacacagaaaccaaaaggacaacattcattcaaaaccggactatagctaccctgcagtgccttggctctgacagcaaagtaaaagtcaaccttgtatatttggagagaaggccaaaggtcaagcatattttgaagaacctgagaatcattgctgctccccgcagaaacagctctgcctcctcaagctgtcacctaatccccacatccaagtttcagactggatctcttctaaaaggcaaaggtgagattggaaaagaggaagggggcaggcactaacttttagttgacatccttgaaggcagccagaactccgtagcaggaaaagctacaagaaaatgaattatccactttttgatggggttgtttgttttttttcttgtaaatttgtttgagttcattgtagattctggatattagccctttgtcagatgagtaggttgcgaaaattttctcccatcaaaaagtgggcaaaggacatgaacagacacttctcaaaagaagacatttatgcagccaaaaaacacatgaaaaaatgctcatgatcactggccatcagagaaatgcaaatcaaaaccacaatgagataccatctcacaccagttagaatggcaatcattaaaaagtcaggaaacaacaggtgctggagaggatgtggagaaataggaacacttttacactgttggtgggactgtaaactagttcaaccattgtggaagtcagtgtggcgattcctcagggatctagaactagaaataccatttgacccagccatcccattactgggtatatacccaaaggactataaatcatgctgctataaagacacatgcacacgtatgtttactgcggcactattcacaatagcaaagacttggaaccaacccaaatgtccaataatgatagactggattaagaaaatgtggcacatatacaccatggaatactatgcagccataaaaaacaatgagttcatgtcctttgtagggacatggatgaaattggacatcatcattctcagtaaactatcacaagaacaaaaaaccaaacaccgcatattctcactcataggtgggaattgaacaatgagatcacatggacacaggaaggggaacatcagactctggggactgttgtggggtggggggaggggggagggatagcatcgggagatatacctaatgctagatgacgagttagtgggtgcagcgcaccagcatggcacatgtatacatatgtaactaacctgcacaatgtgcacatgtaccctaaaacttaaagtataataataaaagaaaaaaaaaagaaaatgaattatcctccccttgggcaaatctacgtgctctctgagagtcagttttataatctctaagatcccttctagccctgatactctgtgattttcatgtgatctccatttctgatggatcttctttcaacagttttttaaaatttctttttttttgtttttgtttttgagatggtgtctcgttctgtcacccaggttggagtccagtggtgcgatcttggcccactgcaacctctgcctcccaggttaaagtgattctcctgcctcagcctcccaagtagctaggattacaggtgtctgccaccatggctggctaatttttgtatttttagtagagacaggatttcaccatgttggccaggcaggttctgatctctgacctcaagtatctgcccgccttggcctcccaaactgctgggattacaggcgtgagccaccgtgcctggccaggttttttttttttttaatttcattttgcatgcacacagtaaaatattcaaacagtatagatttatagtgaaaagtaagtctctctcctactcctgtctctcaattctccagttctctatccctgatggaaccactattatcaacttattatatttccttccggagatactctaagaatgtatgaatgtgcatattttaaaaacataaatggtaacataccatatacactgttctgccccttgcttttgcttgtttttgttttttgttgttattgttattttgttgttgttgttgttgttttctttggagatggagtctcactctgtcacccaggctggagcgcagtggcgcgatctcgtctcactgcaacctcctcctcccaggttcacgtgattctcctgtctcagctttccaattagctgggattacaggtgcccaccaccacacccagtgaatttctgtatttttagtagagacaaggtttcaccatgttggccaggctagtgttgaactcctgacttcaagtgtttcacccacctcagcctcccaaagtgctaggattacaagcgttagccactgcgcctggccaatcccttgcttttccatttaataatatatcttataggtcgttccatttcaatacgtatatatttaccccatacttttttatatttgcctcattctttttaacagttttacattattccatagtatgtctcttccatagtctttttttttttttttttttgagacagagtctcgctccgttgcccaggctggagtgcagtggtgcgatctcagctcactgcaagctccgcctctcgggttcacgccattctcctgcctcagcctcccgagtagctgggactacaggcactcgccaccacacccagttaattttttgtatttttggtagagatggggtttcaccgtgttggccaggatggtctcgatcgcctgaccttgtgatctgcccgccttggcctcccaaagtgctgggattacaggcgtgagccactgcacccggccatgtctcttctatattctactagccccctattgatatatattttggtcgtttccaatcttttgcaaatacaaacaattccgaaaacaatgaccgtatatattcttcttttttctcttttttcttttaataaattcttttcccctctttcactattactcagtatctatatatattcttcttgtatacctgcaatttatcaataagatttatcaatttatcaataagattccaagaagcaggattgttgcatcaaaggctgatagttactgctaaattaccctcactagaggttggttccattgtgcatatccacactgggggagaatgcctattcccccacagctgctggacagtggttcttaacctcagcctgaagtttctctccttctgccctcctttccttttctcaccctttctttttttcatatagtttttttttttctttagtgtagccggttcctctttataaactggcagtcccctagatgctattgctacattactggaaaaataaaataaaacttgacatttttagagaaattggggatccacaagcagaataatggaaaaaactttaaactctagactaaaactgggaaataagtggataggctctcaggatgttacagaaaaactcttaaaaactcaaaagcgtcaggtgcggtggctcacgcctgtaatcccagcactttggaaggccgaggcaggcggatcatgaggtcaagagatcaggaccatcctggccaacatggtaaaacctcgtctctactaaaaatacaaaaattagctgggcatggtggcgtgtgcctgtagtcctagctactcaggaggctgagacagaagaatagcttgaacccaggatgcagaggttgtagggagctgagatcacgccactgcactccagcctggcgacagagcgagactctgtctcaaaaaacaaaacaaaacaaaataaaaaaattagccaggcatggaggcacgcgcttgtagtcccagctactcgggaggctgagacagaagaatgacttgaacccgggaggcggaggttgcagtgagccaagatcacaccactgcattccagtctgggcaatagagcgagactccatctgaaaaaataaacaaactcaaaagactctggcagggttttgaactttgaatattaatgcaaattaattaaatccaattgtttccctcttaacatgtgacaccttgctgtccatggcagctgtgttggggaaaagtggacttaagtcattttggagtttggagcactctgggtggagtgaatatagtgctaggcattgtgagacttggggcaattaaggacattagctcttagaaattgggacaaggaaaactgaggggttaagggggaggagagatgccaaagatcaacctgacctaattcaaaaatttgcacttggttagcctcccagagaaaaagaaactcttcctctttccttcataacatagtagttggttcccacatctagaatttaagctaatactctgtactatttgagctatgcaaaaagattaaatggatatttgtagattagtttggggacctaatcatcactcatgatacatttttatgaaaccataatgatgaatcccaaaaaacctatttatttatttgagacagagtctcgctttgtcccccaggatggggtacagtggtgcaacctcagctcactgcaacctccgcctcccaggttcaagcaattctcgtgcttcagcctctcgagtagctgggattacagcaccaccatgcccagctaattttttgtatttttagtagagatagggttttgccattttggccaggctggtctcaagctcctgtcctcaagtgagatcacttgagcccaactcagcctcccaaagtgctgcgattataggcgtgagccacctcacttggtccaaaacaaccaatttatgtatgaacttttgaaacataatcccttctacaagtttgaaacttcctatcctgaatttaaatctccactcaataccagaagtgataaacctcaaacagggtagaaataaaaattagagccgggcgcggtgtctcatgcctgtaatcccagcactttgggagcccgaggcgggcagaacatgaggtcaggaattcgagaccagcctggccaacatagtgaaaccccgtctctactaaaaatacaaaaattagccgggtgtagtggtgtgcgcctgttgtcccagacagtctgcataggaggatgtcctggaaatggtcagaagacagttcatgaaaatgtcctcaagtaaaatagaaatttggaactgtaagggtgagaatgttctgcaatacaaatgctcatcagaagatgtgggtcaacatggaatgtagaaaaaggtaaatggagactatttgttattatttaagaaatttggaaaaggaaaagacggctgttatcaatatttcaaaatttccttctggtggagacagatgactcattaggtcatctttttccccctctttcaatcataatatcattcagtttgcaaagtgtttacacacatgctttctcatttttatttgtttctgatcttcacaacacccctgtgaaataggtagagcaagtattattttactattaccatcttacagattaaaaaaaaaaacacagataacttgtggtgacttgtccaaagtgagatttgtttatttttatctaatgtgacttataaacatgtaagttatcacttcgaagaactgactagcactatgatgaaaatgttcttgttttttcttttgaacttgttgactttatgtctgtctctgccaatgtctgccaacactgtcttcctgattaaactggaatcggggatcacctcttcccctatgatttcatgtacagtgcctggtactatggccactggcctctgaggtaaagaactatcattttctcatggacttaagacatggaagagtaatttagaaaagtcaagtagaatttatagaccttaatttaataagcaatgatatgagaccactaaaaatagaacagaaaccacactgtctgaattggattaggtcaattctggagacgagtgaggttatttccagactccagctagactctatccatctcccatcacttccactgctggtgtgaatcacatcatctctcatctggacttttgcaatggcctcctaacaggttaccctccttctacccttgcccaccccaacccattccccacacagtagcccagagatcctttgaaagcaaggccaggctgggcacagtggctcatgtctgtaaccccagcactttgggaggccgaggtgggcagatcacttgaggtcaggagtttaagaccagcctggccagcatggtgaaaccccatctctaccaaaaaatataaaaattagccgggtgcgatggcatgcacctgtagtctcagctacttgggaggctgaggcacgagaatcattttaacctgggaggcagaggttgcagtgagctgagatcacaccattgcactccagcctgggtgacagagggggaccctgtcttaaaaaaaaaaaaattgctgaatgaatgaaatcaaggagtacatgaagctgggtggcttttccttcttccagctcctcctgctttccccagtcccctctcagagtagttgatctagattctactagacacacttgcagcagtcattaaggctaactgtgatatttcatgttcttccttggactttggagccatctctttttaaagaaggaaactgtcaacagtttttatggccttcatctttattattattatggcctaaataatgataggcaatgatatcattggcatgactccttcactttgatcctatgttagttaaaagtcccatgggcatttaatccatatctcttattagtgtctctatcctcatttactcttggcattattttgtgctcacaccctaaacctatggacagacaggttaatgggaccacaattggaagtttactatcagctgggcagggtttcatcagataaaaccaaaggcaggataaagttttcccctaaagtttcatcttttctactttgttttatagcttttttaccagggatctcacaatgtaaagtcctgggggcttcatcagagacttttcccaccactgccccttctataactcctgggaataaagaaggagagaaaactacaagtaccggtaatttttctagctttgaaatgacaaagtacagaataagtaggagtaaaatgggaacagaaaagaaacatttttagccccagcgttagtctggatctactgatatttttcttgaggttgagaagttactgaatgtacattgaaaaatcattcaattttttattttaaaaaattagcttctctaggccgggtgctgtggctcatgtctgtaatcctagcactttgggaggccgaggtgggcggatcacctgtggtcaggagttcaagaccagcctgaccaacacggtgaaaacccgcctctactaaaaatacaaaaattagccggacgtggtggcaggtacctgtaaccccagctacttgagaggctgagaaagaagaatcgcttgaacccaagaggtggaggctgcagtgagccgagattgtcccactgcactccagcaggggcgacagagtgagactttgtctcaacaacaacaacaaaattagcttctctataaaggtcccagaaatgtttgtaatttgacaccatcaatgatcatttatctccacgcaaatgagctcaccctgtcgccagaattagggacagaaaaaactgtatttctgtagtaggtaattctaaccactgtatgtatagatggacaatatttaaacactaagcaattataagagtgatgacaccaaccaagtgcttttctttttctttttttttttttgagacagggtcttgtgttgcccagactggagtgcagtagtgcaaacatggctcactgcagccttgacctctggggctcaagtgatccccccacctcagcctcctgagtagctgggactacaggtgtgtgccaccatgttcagctaatttttaaatttttgtagagacagggtctcaccacattgtccaagctggtctcagactcctgggctcaagcgatcctaccgcctcagcctcccaaactgctgggattacaggcattgcccaccacgcccgtccccaagagcatatatttgttttgatatggagtctcactctgtcacccaggccggagtgcagcgatgtgatctcagctcaccacaacctccccctcctgggttcaagcaattctcctgcctcagcctcctgagtagctgagattacaggcatgcaccaccacgcctggctaatttttgtatttttagcagagacagggtttcactatgtttgccaggctggtctcgaactcctgactttgtgatccgcctgcctcagcctcccaaagtgatgggattacaggtgtgagccactgcgctgggcctccaacagcatactttcatcttcactgtttttttgtttttgttctttaagatggagtgtcactctgtcccccaggctggagtgcagtagcgtagtctcagcttactgcaacctctgcctcccggatccaagaaattctcctgcctcagcctcctgagtagctgggacaacaggcatgcaccaccatgcctggctaatttttgtatttttagtagagacgggtttcaccatgttggccaggctggtctcaaactcctgacctcaagtgatctacccacctcagcctcccaaagtgctgggattacaggcatgagccaccgcacacagccttcttcactgtttttttagcaacagtcctccttaaattggccaggactaaaattctgtaagattccaatttgggttacatcctagtttctaccaggggaaaaatgtgatattagtaataatgagatgcacattagggccaggtgagttggctcacacctgtaatattccagcactttgggaggccaagactgtaggatcacttgaggccaggagttcaagctcagcgggaaatataatgagactctgtctgtataaaaaaattttaaaaattagccgggcatggtggcgttcgcctgtggtctgagctactcaggaggctaaggtgggaggatggtttgagcctgggagattgaggctgaagtgagccaagattgtgccactgcatgccagtcttgagtgccagagtgagaaaaaaaatgcatattagccatttgccgccagattgagcttctgacccagaagcagtgctaatttttacatttcttcctcttatattctatgaaagccaggagaaacataggaaaggcgactttctaatcccataaaatgtgtcagagcaaaatggtaggaaccctgataaagctgacagtaaaagaagtttagagctccatgtgtacccgagatttttcttcctgcgagcagtgtaagaatcagccctatgtgattatggaaaatccccaattccagggaaggtgactcagtgggaagagagtgcaaaagaagttagagcagagcccatgatgctcagctcaccctcacaccccctccagccctgagtttgaattggaaattctgcctctgcctctgggttagtctgggcctctaatagtcttgtgagccagaagaacttcaggtcaaaggatcaatctctttcctctctcaaattttcttttctccctcttccactcccctctctcctttagacacagatgagaacctagagaagagacagaaatggagtattgtggtcaaaattctgattgctgtcaccctgttgctcagtggagttgccattatagtatttgtaatttttgaagtcccatgtcctgtaagtttgctgttgtattgaatccttgaacttgacccataaagactttcttctgttccagaggcagcttggcataaggagaaaagcatagactttggaatttgaggagatgtgccactcacactcactagctgagtggtgttgggaaagttgcttgactgttctaacctcagtggcctcatgtgtaaaataagtctcatgatatttgcctctcatggtagttataaagattgagattctgtgtgaaaggcacctggcacacaggtgctcactaaatgcagttcctttcctctgctgtacttagacattttctaggaaggataggtccaataggactgaatattttatttagaagagatggcttcctttaagttgcccaacaagaggtttggaagaaaaccaaatgcttaccagccacttcatattaataccagtcattttctcccttcagtatcaatgcctaggagccaggaagctgtgccaatgccagtggttgtggagatggcaaaagaagggaggccagccacctgggacagctgaatccaagcctgactctcagccccagaaggaaagtgttctctgtgtggtttatgtcatttgcttaaagaaggtggggtaggggccgggcgtggtggctcacacctctattcccagcactttgagaggctgaggcaggtggatcacctgaggtgatcgagaccagcctgaccaacatgacgaaaccctgtctctactaaaaatacaaaaattagccaggtggcacatgcctgtactcccagctactcggaaggctgaggcaggagaatcgcttgaacctgggaggtggaggttgcagtgagccgagattgtgccattgtactccagcctgggcaacagagtaagactctgtctcaaaaaaaaaagaaagaaaaaaagaaaaacagaaaatggggttaatatataagtgctaggagattcgtccctaagaggactgtgaaaaaatattttttttaatgtgctgggaacagggagctgcttcagttatgaagcaaatgtgggcaatccttcttatgtcaggaaataggtaggattttatcctactgttttcctaacatcagtccagacatgatacaatagggtgcttattgaatacacatacctctgggccccatataaactgaatcagatcatttagattggagtcaagaatcttacttttaagatttttaaggccaggcctgattcatcatgcctgcaatcccagtgctttgggaggcagaggcagaggcaggagacttgctagagtccaggagtttgagaccagcctaggcaacatagcgagacactgtctctattaaaaaaaaaagtatatatatatatatatatatatatatatatatatacacacacacattatatataaatatatataattatatatttattatatataattatatataatatattatatatatattatatataattatatataatatattatatataattatatattatacataattatatatatatatatatatatatatatataaaaggccagctgggccgggcacggtggctcacgcctgtaatcctagcacgttgggaggccaaggcaggtggatcacgaggtcaagagattgagaccatcctagccaaaatggtgaaaccctgtctctactaaaaatacaaaaattggtggggcatggtggtgtgcacccgtagtcccagctactcgggaggctgaggcaggagaattgcttgaacccaggagacagaggttgtggtgagccgagattgcgccactatactccagcctgggtgacagagcaagactccgtctcaaaaagagagaaaaaaaaaaaagccagctggtggcatgtgcctgtagccctagcttcttgggaggctgaggtgggaggatcacttgggctcaggaattgaagtctgcaatgagctatgatcgagccactgcactccagcctgggaaaaagggtgagaccctgtgtccaaaaaaaaaaaaaaattatcatttctcctgaacattggaagaaataggcctgaagggactacaaagtctagtccagaatagaattagagataaccaggtagctgcaactgtgattgaacttctatgaacacaataagctactaaatgataaaggaataaaaatagggccaggcgtggtggctcatgcctgtaatcccagcactttgggaggccgaggtggatggatcatgaggtcaggagtttgagaccagcctgaccaacaaggtgaaactgtctcaactaaaaatacaaaaaattagccaggcatggtggcacacgccagtaatcccagctactcaggaggctgaggcaggataatcgcttgaacccgggaggcacaggctgcggtgagctgagatcacaccactgcactgcagcctcggtgacagagcgagactctgtctcaaaaaaaaatagtactaagatagcaatcttatatacattatctcatttgagccttacagaaatcctggaaagtagccagggcaagtatctacattttactcatacttaagttgaggcttgaagaggttatgtgacttcccaaggttacacagctgttagaaacagaactatgatccagatcttttaattactttgctagtgggttataggttccaagcaattattggttctcatacctatgtgcaccttgatcatactttctcagtgtaattatcgattaacaaagaggcaaaatgaagtgcacttggaattacatggggttttgtacttagccagcccttttcttggtacatgaagaactatacacttgcatccttttttaactttcatatttcctttcaatctctaggttggacaagatgctgccaattcatcaaacccaaagaaagctgcagagatcactgttatccaccagacatacttctgaaaagttctgctctatctcaaagactgaatgatactacacagtcctctccctattaatatgggcacattcttgccaatttcacacttgtatcttcagcagggacattacaatcaaacaccaattcctggttaatgaagggagagtgtgggcttagcagagttaccctcatgcccctatctgagccacaaccttctgtaattcacttcatacatccatctaaatggatacctttccatcccctcaaacgagaacaaaaagtattccctgcaagcactatgaatggaccttactactctctttgacagaagactcaaacacagcctctaagaaacaaggcagctgttagtgtgacatagcttccagctcctctgttatcttcacagctgacttcacactcactggccctcaatagcttagagtgggactcctgatctccctggttgacgtttataaggttttgtaatttagcttctggtactacatgtatctatccacacactgctgaagggaacttgaccctacgcattccaaaagccttcctcataagttatccccaaggggttcagggactacagaccattagtacccaagtgaagtcttctgacgatccagaattcctaaggtggctctgatattatatcatactttaatagagagttgcataccttttggacaaagattccagagcaaaataattatgataatgctgtttctcacaggagaatagctatgagtcaaatctaacctgcttaaataagagtttggtgagaaagtgaaaccacctgatcttgaatcaatgttgaggtgaaaaaggaaatgtcaggagggataagacagggtgaggccctgcttcttttcctaagagtctgaaaccattccatttcattttggtgaaatgtgtctgtttctaagaaattctgttttcttagttctctggttaaaaaaaaaaatacataaactgtatccttctttctttcacttcaagtgctgtccaaaaagtgattatcaaaacaataccaacaggggaaaatctcaccctaaggctcgatttaatattcaagtccagcctgaaagagaacacatataaagcatggataatgaggatatgtttcaaagaagctccaaagaacctctagggccaggcatggtggctcacgcctgtaatcccagcactttgggaggccaaggtgggtggatcacctgaggtaaggagtttgagaccagcctggccaacatggtgaaacccgtctctactaaacatacaaaaattagccgggcatggtggagggcacctataatctcagctactggggaggctgaggcaggagaatcgcttgaacccgggaggtggaggttgcagtgagccccgagatctcaccattgcactctagcctgagtgacaggagcaaaactccatctcaaaaaaaaaaaaagaaaaaaaaaagaacctctaaatgtccatagagcataccttgaaaatatagtagagaggaaagagcactgaggttggcatttggatgaatgagtatattatttgcatcctgccactgatccacgatgttgcctcaagtttattttgccatctgtgacttagtttgacaataaaataggaagaaaaaaaatgcctgctctttcccaagaccactggtgaggatgattaaaagcattatatacttagaagctcttggtccagaactaaggcctacatgcatcctcacccttcccagcctcacccaccactgaatgtcccttaatcctgaaacatgagatgtcccgggagataaaacctatggcaaaatctgcgctcatcaactcttctacaagagtataattggaggccgggcacggtggctcaagcctgtaatcctagcaccttgggaggccgaggtgggcagatggcttgaggccaggagtttgagaccagcctggacaacatggtgaaacccgtctctactaaaaatacaaaaattaggcaggcatgctggtgcgcacctgtaatctcagctactccagaggctgaggcacaagaattgcttgaacctgagattgaaccattgcactccagcctgggtgacagagcgagactgtctcaaagaaaaaaaaaaaaagagtataatttgggtaacatttgtactgactttatagaaattcacagacagaatcaaaattattttgctttggggacaatttgtttcccctgacaaagcatagacccctctgaggattttctgactccctaatccattaataacttcaagtcctatattcccttccagtgaagatctgtaaaaacagagatgggagagatggcagaggagaaaggagaactcctgtgtgggctttgggatgtggatctgcagatcacttcagagctgggcaccatttctagtgtcaccattatagaccaagttatacaaaacttgataaaacactgtttctgtggaagtgccaattattcctgtggaattatttgctgtttcttttctttttctttttttttttttgagatgcagtttcgctctgttgcccaggctggagtgcaatggttcaatctcagctcactgcaacctctgcttcccgggttcaaactattctcgtgcctcagcctccccagtagctgggattacaggcatgcgccaccacacccagctaatttttgtatttttagtagagatggggtttcacaatgttggtcaggctggtctccaactcctgacctcaagtgatccacccgcgtcggcctcacaaagtgctggggtaaaaagtccaggcgtgagccactgtgcctagccttatttgctgtttctattgcaagttctttcttattaagctaccacactttgtttttataattattaaagtgcattctcggccgggcgcggtggctcacgcctgtaaccccagcactttgggaggccgaggcaggcggatcacgaggtcaggagatcgagaccatcctggctaacacggcgaaaccctatctctactaaaaaaaaaaaaaagaaaaagaaaaaattagccgggtgtggtggcaggcatctgtagtcccagctactagggaggctgaggcaggagaatggcgtgaacccgggaggcggagcttgcagtgagccgagattgtgccactgcactccagcctgggcgacacagcgagactctgtctcaaaaaatatgtatatataaaatatataataaaataaataaagtacattctcattataaaagcttttagaaaatactcaaaagtataaagaataaaagtaatacctaatctctcttcccagagataatcattaacactggttaatatgtaatcagtggttaatatatctctttatggacattataaatatatatacacatataataaaaagacacatacaaaacttcatattcttcacaccactttaaatctgtctctttggctgggtgcagtggctcatgcctgtaatccttgcattttgggaggccaaggcaggtggatcatttgagtcaggagtttgagaccagcctggtcaacatggtgaaacaccatctttactaaaaatacaaaaaattagttgggcatggtggcaggcgcctgtaatcccagctactcgggaggctaaggcaggagaatcgcttgaactcaggagactgaggttgcggtgagctgagatcgtgtcactgcactctagcctgggtgacaaagcaagactccatttcaaaaaaaaaaaaaaaaatctgtctcttcttcttggctaatatattactactacatttcaagaagttgtgtttattttcaagttttagaggtgactagaagctgttccacctttttttaaattttaattttttgagatggagtttcactcttgttgcccaggctggagtgcaatggcgtgatctcggctcaccgcaacctccgcccgggttcaaaccaattctcttgcctcagcctcccaagtagctgggattacaggcatgcaccaccatgctcggctaatttttgtatttttagtagagacgaggtttcaccatgttggtcaggctggtctcgaactcccgacctcaggtgatctgcccatcttggcctcccaaagtgctgggattataggcgcgagccaccgcgcctaggctgttccacctttttaaagggttgatgtcaccccaatactttttgataggcccaaaaattaagataggtagttgcttagggcaaagaaggtacattcacaaaaacctccaatttaaactttttaagttattgctgaatgacattaagtaaacagccatatttgcgtgtgtattaaaagcattactttgttaaacagaaacacttaaaatatacaacagccaggcatggtagctcacgcctgtaatcccagcactttggagggccgagtcgggtggatcatctggggtcaggagttcgaggccagcctggccaagatggtgaaaccctgtctctactaaaagtacaaaaattagctgggtgtggtggcacatgcctgtaatcccagctactcgggaggctgaggcaggagaatcgcttgaacccaggaggcagaggttgcagtgagctgagatggtgacactgcactccagtctgggtgacagagtgagactccatctcaaaaaaaaaaaaaagataaatataaataaaatataaaacatattttgtatctctgttttgccatttcttcattttttagataaacccataatctcaaaaatcaaagtgacctgggactgtggatctctgaaaggcctgaacaagccattaacatccttccttttctgtactcccaggctagtgcaacggtggtttcaggagtggtactggccttaaccattatttcctcatatctcctaccccctcctattaatattttggatgctttctaatcactgcccagcagattctgacctagagcacttttcctatgtctatgtccataactagccattttccaaggaagagttgctgcatgtacttatgactaaaggccagaagaaatctttttattttttgtttgccctggacaggttgagagtcctatgatcccttcctccccatcccactgatactccactcccactttcaaaaagtattccattttctgagttgacacaatggccctcaggttgccttgaattacttatcttccctattattagtaatagtagtagtagtattatactttaaattctagggtacatgtgcacaatgtccaggtttattacatatgtatacatgtgccatgttggtttgctgcacccattaactcgtcatttacattaggtatttctcctaatgctatccctcccccatccccccaccccacgacaggcgctgatgtgtgatgttcccagccctgtgtccaagtgttctcattgttcaatttccacctatgagtgagaacatgcgatgtttggttttctgtccttgcgatatttgctcagaatgatggtttccagcttcatccatgtccctacaaaggacatgaactcatcctttcttatggctgcatagtattccatagtgtatatgtgccacattttcttaatccagtcaattacttatcttcttatatgtacttactggttcttctgcttgaagcccagtatctgtgttaatttgtatatctctatattactttgtatcaacaaagcaccatgttcatagcagatactaaaaatatttgttgataatgtcacaccaccaaatggataagctaagggtagcatagctgactttctagaagagaatgaagtaagctttatttttatatcaaagttgctatcagttaccagggagatgcaaaccagtaaagggtcatactataattgttgctaacacttgaattcatctctttagacttattttccctcatatttcatcatctgttcctttttctcttcctcttcattattacaacacttttcttttgtctttccttattcaatgacctgatttgtcagtgatcaaattctaaaaatttccctcaatctgaacttctagtgaacttcgatccatgtttatactgaaatttcagatccaaaaagtctttcctttaccccaccctccttcacttggtgcagtgtagcaacaggtgcaccttggaccgtaattgaggaactttcactggactcttgtgaatttgcaccatccagtggctgaaattgctaactgcatcctctgaaaaaaggcagtgggcacaaataaaaaaatgtaaaatgggggctgggcgcggtgactcactcctgtaatcccagcactttgggaggccgaggcaggtggatcacaaggtcaagagattgagaccatcctggctaacactgtgaaaccccgtctttactaaaaatacaaaaaattagctgggcgtggtggcgcgcgcctgtactcccagctactcaggagcctgaggcaggagaatcacttgaaccaggtaggcggaggttgtagtgagccgagatcgcaccactgcactccagcctgggtgacagagcgagactctgtctcaaaaaaaaaaaaaaaacagtttggcctcctcttctagctgttgtggtatcacttttttttttttttttttttttgagacgaagtttcgctcttgttgcccaggctggaacgcaacggtgcaatctcagctcactgcaatctccgcctcctgggttcaagtgattctcctgcctcagcctcccgagtagctgggattacagacatgcgccaccatgccctgctaattttgtatttttagttgagatgtggtttctccatattggtcaggctgtctcgaactcctgacctcaggtgatccgcccaccttggcctccaaaagtgctgggattatgggattacaggcgtgagccaccatgcccgggctttttttttgagacagagtctggcactgttgcccaggctggagtgcagtgacacgatctcagctcaccgcaacctcagtctcctgagttcaagcgattctcctgccttagcctcccgggtagctgggattacaggcgcctgccaccatgcccagctagtttttgtatttttagtagagacagggtttcaccatgttggctaggctagtctcgaactactgacttcaagtgacccacccacatcagcctctcaaagtgctgggattacaggcgtgagctactgcatcgggctttcatcatatccttatgaaacgcttatgaattagacattattattttcattttacataggaggagaaaggagatgcaggaagataataacttccctaaattcttttttttttttagatggagtttcactcttgttgcccaggctggagtgcaatggtgggatctcggctcacggcaacctctgcctcctgggttcaagcgattctcctgcctcagcctcccaagtagttgggattataagcatgcaccaccatgcccggctaattttttatatttttagtagagatggggtttcaccatgttggctaggctggtctcgaactcctgatctcaagtgatccacccgcctcagcctcccaaagtgctgggattataggcatgagccaccgcaccaggccctaaattcttaaaggtgataaggagtggagacagaattcaaattcaggaaagtttcaaagtccatgcttgctttttcaattatattaaacaatgccaagttccttgcatattccaagcatttattgggcacctgttggttgcacaagagtatagactgcctgtcaccaaatgatgcaaaataatttaggagcctgttttgacagtcacaagatggaggtcctgtacattaggcagaaaagtatgcagctaggcagcctagtaggcattttagaattgtctgataaaccgagccacttagcaacaatatatttctagttcacctaattttttgggttctgcccaaaggctggtgactcatgagacagatattccgcactctgtgtacatgagaaagaagtcagtaaggtgaggaagaagcagaagagatgggtaacgaaggcctggattcacgaaaactgtttaatggccatggtattatgaaaatcctgatgccagccaactcttgagtgttaaataatgagagtcagtttattagttatatttggacagatctggttttttgctttatttttataaataatgttctaagaaatttattttatttaatttacttatggcatatttaaacattttttggcaaataaaaattgtgtatattcatgatgtacaacatgtgttgatagatgtactcattgtggaatggctaaatcaagctaattaacaaatccattacctcaaatatatacccattaccgcaaatacttatttttttgtgtggtaagaacaactaaaatctactctcttagcaattttcaagcatatatatatttttgtttgtttgtttgtttttgtttttgagacagggtcttgctctgttgcccaggctggagtgcagtgatgcaatcttggctcactgcaacctctgcctcccgggttcaagtgattctcatgcctcagcctcctgagtagttgggattacaggcatgcaccaccacgcctggctaatttttgtatttttagtagagatggggtttcaccatgtgggccaggctggtctcaaacccctgacctcagatgacccacctgcctcagcctcccaaagtgctgggattacaggtgtgagccacagtgcctggcctcaagtatatatttttaactatagtcaccatatagtataatagatctcctgcacttattcctgctgtctaactgaaattttgtatcctttggccaaaatcttccaattctttctctctcatcccctggtaaccaccattctgctacttctacaagcttgacttttttagatgccacacataagtgagattaagcagtatttgtttttctgtgcctggcttatttcacttagcataatgtcctccaggtccatctatgttgctgcaaatgacaggatttccttattttttaaggctgaacagtattccattgtgtgtgtgtctgtgtgtgtgtgtgtgtgtgtatctatatctcacattttctttattcattcatccattggcatacatgtaggctgtttccatgtcttggctatggtgaataatgctgcaatggatatgggagtacagataccttgacatgcagatatcatttcctttggatatatacccagaagtggattattggatcatatggtagttccattcaaaaatttttaaggaacctccatactattttccaaaatggctgtactaatttacattcccactgacagtgtacagggtttttctccacatccttgccaatgcttatctcgctttttgataataatcattctgacaggtgtgaggtgatatctcatggtagttttaattcacatttccctgatgattagtgatgttgaacatttttttcacataccagttagctatttgcatgtctttttcttttgtttttcttttttttttttttttgagacagagtcttgctgttgcccaggctggagggcaatggtgtgatcttggctcactgcaacctccgcctcctgggttcaagtgattctcctgcctcagcctcctgagtagctgggaatacaagcgcccgccaccacgcccagctaatttttgtttttttagtagagacagggtttcaccaggttggcccggctggtctcgaactcctgacctcaggtgatccacccgcctcggcctcccatgctacttgcatgtcttcttttgagcaatgtcttttcaggcccttgtccacttatctgatgtaggggtcgtgaatattttctcccattccgtaggttgtctctttacctttttttttttttttccagacgaggtctcactctgttgcccaggctggagtaaagtggcacaatcacggtcactacagcctcaactgtctgagctcaagtgattctcctacctcagcctcccaagtagctgggaccacaggcgtgtgctatcatgcccagctaattttttgatttttttgtagagttgaactctcactaagtcacccagtttagtctcgaactcctgagcccaagcaatcttcccacctaggactgtcaaagtgttgggattacaggcatgagccaccgcaccaggccagaaactctacgtttgattctaaccacagcagcttagcagctgaggacaaactgttgggatattttggtctcagtcaatggcagccaggttaccaaccctgacaagatacaagttttcttcgttgggttcctggtacaaaagtcaaccttttcagttacttatgaatgaaagggcatgaagattgtgctattagtttatcctgaaggtcaatcttcaaaaatactggttcaacatggatttggatattattaatataaatttatggcttaaagaggacaaaaggtgtttttttgggttcctttacagagatatttagtgagggaacaaggcacttagtcatctttgctatgacaggttaaatacaaggtgtactgggaacatgtaagagggtgacttaactcagccattggggggtcaggagaagtgttcctaaggaagtgatgtctaagtgaggtaggcagtaccttggcaaaaaaaaccttgaagttaagagtgcatatgagaaatgaaggtatgtccacctggctggcaaatggagtctaagatagggcagtgatgataaagatataggaagatgctagatctggaagggccttctaaaaagaatgacaatataaatttattgtacaaatggagactttactgagagtgaaaccaggcaatattaatacttaggtagggacaacagatataaaccaggctattctcagcaaatcagaaattatggtcaccctacttgtaagtcacattcaggtgcttagactttcagtgaaagcatagagtatgtatcttctacattttgcctaagtgacttcattctttttttttttgagacagagtctcgctctgttgcccaggctggagtacagcggcacgatctcagctcactgcaagctccacctcccaggttcacgccattcttcttcctcagcctcctgagtagctgggactacaggcgcccaccaccacgcccggctaattttttgtatttttagttgagatggggtttcaccatgttagccaggatggtctcgatctcctgacctcgtgatccgcccgcctcagcctcccaaagtgctgggattacaggcgtgagccactgcacccagccagtgacttcatttttacttttgcctttacttactcatttcacaagtatttgaggatacacttcagagcactgaggttacaaagacaacagtgtctgtcctcaaggtctgtctaggtaagacacacagccaaataaacaattctaatacagttatacagttttagttctgacacctccaatgagctgtagacttgtatttgtcatttccagtcagaatgcaaaacacagatccaaaacagaactttcaatttctcctccaaatctattcttccttcagctggtcgtgtaagtgatgccactatcacatccacttaagacaaaaacccagaggagtactgccttaatcagtaatcagtgttacccttcttctcactgtgcatgttaattttgccacatctttttttttttttttttttttggtacagtgtctcactctgtcacctaggctggagtgcagtggtgtgatactgggtcaatgcagcctcaaccctctgggctgaagtgatcctctcacctcagcctcctaagtagctgggactacaggcatgcgccactacacctggctaatttttgcaatttttgtagagacgaagtttcaccatgttgcccagttctcatgcctccttgaactcctgaactcaagtgatctgcctaccttggcttcccaaaatgcagggatcccaggtgtgaggcaccgtgtcctgccctctccacatctttcttaagcacactgactaaattggtctaagtagagcctaacatcaactgaagggagagggtaatttccaggtagttgaatgctatgatttttgtttttttgtttttgagacagactcttgctctgttgaacaggctggagggcagtggtgcgatttcagctcactgcaacctccacctccagggttcaagcaattcttgcgcctcccaagaagctgggattacaggcatgcgccaccacacccagctaattgttgcatttttagcagagatgggttttcgccatgttgcccaggctgatcttgaactactggcctcaaatgatccatctgccttggcctcccaaactgctgggattacaggaatgagccactgtgcctggcccctgaatgctatgtttttaacgactagatctcagtattatgtgggactaatttttctacagtattacaacactgattactgatattcattgttgacaatcatgacatccagatctggatatttgccttagccagtctcaaaatttgagtttcaatgacaaagacacagatatgtcctaaatgactgaccccacttccactatgtgaagttgagagtggttgtaaagctgtacagctataggtgaaacactaatgttaatcaactatctgttgaacaactaccatgtaaaaggacaatttatgccttagagagcaatttaaaatttttttagagatgggggtctcgatacgttgcctagactggtctcaaacttgggctcaatccatcctcctgcctcagtctctcgagtagctgggattacaggtacacaccacttcaccaggcaaagggcaattttaatatttctaccatccattctccacacagctgccacagtgattttttttttttttttttttttgagatgcagtttcactctgttgcccaggcttgagtgtagtggcacaatcttggctcactgcaacctccacctcccaggttcaagtgattctcctacctcagcctcccgagtagctgggattacaggcgcccgtcacaatgcccagctaattttttttgtatttttagtagagatgaggtttcaccatgttgaccaggctggtctcgaacttctaacctcaagtgatccgcctgcctcggcctcccaaagtgatgggattacaggtgtgagccaccgctcccagcccacagtgatccttttacagcaaagctactcctttgctctcaacccttcgtcatattctgtcacttcccaataaaatccaaaccttaccagatgatacatgatctgccttgatttccatctaatttctctcatttgctgtgctccagccacactggtcttgccctttctccatgccaaacaaatccccatttcagggtcactgcacttgctgcttctcttctaggatagtttccctctagaaatccatgttgctccttctctcattaaatgatcagatatttatgtgcctccttagctaagaggccttccttatctaccctaactaagagaatccccatatcactcttatccttttatcctgatttatttttccataaaacttgccacattactgggcattatctatcatttagtaatgtgtatattgcttattgacagtcttccctactataatatgagctccatgaggcagagactttgttttgttcactgctgaattcccagcacctacaacaagcctactcactaaacatttgttgaattaatcttcaggatacatcaaatgtaaaatatcctatcatatatttattgatgtgatgcataggaaaatgtctggaagggtacataccaaaatgttaattatttatttaacctggtgggaggtggtttttctttccttttcttttctttttgagacagagtttcgctctcgttgcccaggctggagtggaatggcaagatcttggctcattgtaacctctgcccccagggttcaagcgattctactgcctcagcctccggagtagctgggattacaggtgcctgccaccacacccgcgtaattttttgtatttttagtagagacgggatttcaccatgttggtcaggctggtctagaactccagaccctgtgatccgcccgcctcggcctgccaaagtgctggaattacaggcgtgagccaccgcgcccggcagggcttttttttttttttttttttggaatgaacttgtattatgcatataccaaaaaagaatgaaagggttcacacaggcataaagtgtaagtgaattctaaaaaaaggttgggcaaatttatcaaaggcagacttctaaatagatgtaacagttatatagttcagataaaccatggtttgaattcccttccccagtacttcctagcagtgtgatcccaagttatttatgtcagtgcctagatttcttcacctggaaaatagggataacaacaggtgcctacctcacaagttttaaatgagaccgtatgtgtaacctgctttgtgcaatgtctggcatgcaataagtactcgacaaatggtagctattagaatcatcattaacagcagtaataagagatcttgggacatacctagccctcaagattgacatcagagtagaccaccacatcctctcatcattgcgcctcaatttgggcctctgaagcccaaagaggggatggttctttccaaagaagacaatttcgacgttccaggagcatctgattgaaacgcaccctcttcaccccttaaaatcagtctggttcatccacgagcagcccttcggggcccggactggagaggcgccacggctcgccgtccctgggcccagttccctcagcctcaatttcccttgctgcaacaggggtggagatgggaacgttatccccaaacccaggcagtcccggctcggcccgcctcaccgcactccggaggggaccaaacagccccacgcgccaggaagcctcaggcaacgggccacgcgccacacgggcaaagtgattactggtcggatcaaaagtcaggcaagcggctcagccccatcctcccagtcctcgggcacggggacagcagcaggcgcgcggcggggaccgggaaaaggccaagagggcggtggcgggcgctcagcacccggcgggggcctccacggccgaggggcggaggcggcgggcgcgcggcacgcggcgcgctcgccactgcgccgcccgggggcgcgcacgcaaagcccggaggcgcgcgcgaccggcggctctttggcgcggattagggggtctcggcgaggtgaggcgccaggcagcgctgggcgggcgggcgggcgggtggcggagcgcgagcccctctagcgggactagggagaagcgggggccacgaggtgcggcgggggaggagtcgcgggctgcgggccccggcggcgggcttgacgcggcaggctggcgggccggcgggcgggcagcggcgggcctcgccgctctgtgggggagggcggtgtggggccgggcctgaccccgggggcccgccccgcgtctgggcggtgccccagtgccccggcctcgccatttcccgctcagccctggagcgcgtagctctaccaagaatggccactgtgccagatgcccctgaccagcgttgcccatttgaatttcctagcaggccccccaaagtaggtatttcagtaccctgttagagctgaggcgcaggtaaaatgactggcccaggccggtcccaccccgtaaggatttgaacgttggctccacaactcgggagcctgcgcctttcctcctcccaacgtggactcctgcccggcgaagtgcctcacttccttctcccggtaactgattcgaatttggcgattgttagtttggagctagcgccagtgtttccacggaagttggtgtcagaatgtggtctcttgtgaaagggggagaaagaagattctgcagactgcaatattgtgcttttttgcctttttttttttttctcctaggctgtactgcagtgcagtggcacgatcgcggctcactgcaatctccgcctcccaggctcaagcgattctcgtgcctgaggcgtgggccaccacgcccagctaatatttgtattttcagcagaggtggggtttcaccatgttggccaggctggtctcgaactcctgacctcaagtgatccttccgcctcggcctcccaaagtgctgggattacaggcgtgagccaccacgcccggccctactatttttttattttttgagatggcgtttctttcgcccaggctggagtgcaatggcgccatctcaacacactgcaacttctgcctcccaggttcaagcgattctcctgcctcagcctcccgagtacctgggattacaggcgcccgccaccacacctggctattttttgtatttttagtagagatggggtttcgctgtgttggccaggttgatctcgaactcctgacctcaggttatctgcccacctgggactcccaaagtgctgagattacaggcgtgagccaccgcacccggcctcctactgtgctttttcgagtgttgatcagtccctattgactgtgcatcctttactggacgtctgtttttgtttttgttttttgagagggagtttcacacttgttgctcaggccagagtgcaacagcgcgttctcagcccaccgcaacctccacctcccgggttcaagcagttctcttgcctcagcctcccaagtagctggattacaggcatacgccaccacgcccagctaattttgtatttttagtagagacagggtttctacatgttggtcaggctgatctcgaactgccgacttcaggtgatctgcctgcctcggcctgctaaagtgctgggattacaggcgtgagccactgcgtccagccttgacatctgtatttgaaatgacacagctatcccttgtaagacactgcgcaagtaacatactctttcagagcttgcttgcttttgaaaaagcagcttgccccaaaagtgtgggagtgaggattcaaagaatccccacaccttggtacccacgggtacctagcaaattgaaaaagttcagtaaatttggcagttatttgattgctgcgttcgtaatacacccttgctagactcatttttcttcagagctcaacttttcctgagaggacagcaaagggagacctaccccaccccaaaaagggaaagttctttgatggcagcgttagcagaaatgttgcccacacttagtgatgaattattctccaagctaaaaattaccagggtgaaaaaaatcacttcagaaaagctaaagataaattaaccttttgtagaattaacatttattagtccactactatgtgtttattgtattcctcctgtatgcttggcattttaaaagcatacagataggtatccgatatagtctctgctttcacttatttattatttatttttgagacaggatcttgcactgtcgcccaggctggagtgcagtggcacaatctcggctcactgcaacctccacctgcctggttcaagcaactctcatgcctcagcctcccgagtagctgggattataggcgcccgccaccacgccaagcaaatttttttgtatttttggtagagacggggttctcactatgttgcccaggctggtctgaaactcctgacctctggagattcatctgcctcagtctcccaaagtgctggagttacagacatgagctaccacacccagcctgctttcacttaatttagaagtgggggaaaatagacattcagaagtaatactcacaaagtagaatgtgaaaaatgccagataaaaagctgtgagtgggccgggtgcggtggctcatgcctgtaatcccagcacttggggaggctgaggtgggcagatcgcctgaggtcaggagttcgagaccagcctggccaacatggtgaaaccccgtctctactaaaaatacaaaaattagccaggcctggtggcccgcgcctgtaatcccagctaattgggaggctgaggcaggagactcgcttgaacccgggaggcggaagttgcagtgagctgagatcgtgccattgcattccagcctaggcaacgagagcgagacttagtctcaaaaaaaaacaaaaacaaaaacaaaaagctgtgagtgtacagaagaaggattattttttgacttagtgtaaaatattattttatttctgcttcaaagaagatactttgggccaggcatggtggctcacacttgtaatcccagcactccagcacttttggaggccgaggtgggcggatcacttgaggccaagagttcgagaccagcctggccaacatggtgaaaccctgtctctcctaaaaatacaaaacaattagccaggtatggtggtggcacatgcttgtaatcccagcttctcaggaggctgaggcacaagacacaagaatcaaaaatgagaaccaaatggagaatgagaatcccttgaacctgggaggcagaggttgcaatgagtactccagcctgggcaacagagccagactgtgtctccaaaaaaaaaagaaaaagagacttagtctgtcctccaagctggagtgcagtggtggctcactgcatcctcgacctcctaggcccaagcgttccacctcatcctcctgagtagctggaaccataagcatgggccactgtacccggctaactttttttttttttttttaagagatggggtctccctatgttgcccaggctggtcttgaactcctgggtcccagtaatcctcccacgtcagcctcccagagtgctgggattacaggcatgagccactgtgcctggccctgttacgtacttgttgaaagagtgaggaacaaatgtatgttgtaatagataggattttttggtttccagttacagaaactcgttcagtcttatgattaaagttgagtttattaaagtttattaaagagagagaaatgagagaagagttaaacagttgagccacctggggctagggatttcaacagccagagcacatggactgaattctttgaatgaattctagtgaataactaagctccaactgccttctgtcctttcatgtcttactcaagatccagatttctggaagaagagacctggttgctttagcttttgtcaggggtggggaatggggtattgtgattggcagccccaccagtatcacatgaaatgtgggagggtcagtttcccaaataaagatggcagctaaggagagaaatgatgctgagtagagaaagccaacagttgtttattagaaatatgtagcatttgcccctgccaccctcagtgccccatagacccagatccttcctcataaaaaagaaaaatatgtagcatttatagaggaccaggtaccatgctacattacttatatggattatgatatttgattataacatttaattctcacaactttggaaggtaggcactgttatacccactacagaggaagaaacaggttttcagaggtggaataatttttcaacattacaaagctaagatgtggcagagctgagtatgttgcatatcttctctttatcttgtccctttgaatgattttctgatccatgtgccacttttgtttgttcctagggagtcatcaagctttggtgtatgtgttggccggttctgaagtcttgaagaagctctgctgaggaagaccaaagcagcactcgttgccaattagggaatggaccgtttgggttcctttagcagtaagtacagtgggaacaagtctcaggtgacttattattattttttttttgagatggactctccctctgttgcccaggctggggtacagtggcatgatgttggctcactgcaacttctgcctcccggctttaaacggttctcctgcctcagccgcctgagtagctaggactacaggcgcgcaccaccacacacagctaattttttttatttttatttttagtagagatagggttttaccatgttggccagactggtcttgaactcccgacctcaggtgatccacccacctcggcctcccaaagtgctgggattacaggtgtgagccaccactcccggccttcaggtgactattaatagcaaactagagtggaagttgatcaaggaagaaaaataaacgatgaagttaggcaataaagccctttgactctgattctaagggaattatgagtatcaaaataaaatcaattaatacatattgattacccattgaacacatgacacaaacatatgaccctgggtcttacaagaaaatgaagcagccgggcgtggtggctcacgcctgtaatcccagcactttgggaggccgaggcaggcagatcacgagatcaggagatggagaccatcctggctaacacagtgaaatcccgtctccagtaaaaaataaaaaaaattagccaggcatggtggcaggcgcctgtagtcccagctacttgggaggctgaggcaggagaatggcatgaacccgggaggcggagcttgcagtgagctgagattgtgccactgcactccagcttgggcgacagagtgagactctgtctcaaaaaaagaaaaaaaaaaaaaaaagaaaatgaggctgagatggaccaggcatattctgattaacctgtagttaaacctagaaaagccatgggatttctgtttagaccaataacatgtttcaggcaccttgataagaaatgtgtcagtggtaagataaaggaaagatcatcccacctcccccttgatgtggaacttgtttctaagagtaaaccacggtagaataatttagagaattatggggtatgtatgaagtaaattcaagtagccataactatggataaaaaaattatactggccaggtgccatggctcacgcctgtaatcccagcactttgggaggtcgaggtgggtggatcatgaggtcaggagtttgagaccagcctggccaacaaggcaaaaccccgtctctactaaaaatacaaaaattagctgggggtaatggcgagtaactataatcccagctacacgggagctgaggcaggagaatcgcttgaacctgggaggcagaggctacagtaaaccaagatcatgccactgcactccagcctgggtgacaagagcaagaatctgtctcaaaaaaaaaaaaattatactgctctttttccctgattctgaatatatgagatttggcagaaatagaaattccattgttagatgtttagtagtatcctaatgagaagaatcagaaaagtactttttgggtgttgtttcctcttcaacaattcgtgttttttttgagatggagtcttgctgcattacccaggctggagtgcagtggcatgatctcggcttactgcaacctccacctcccgggttcaagcaattctccgtctcagcctcccgagtagctgggagtataggcgtctgccaccacgcccggctaatttttgtatttttagtagatacagggttttaccttgttggtcaggctggtcttgaactcctgacctcaggtgatccaccagccttggcctcccaaagtgctgggattacaagcgtgagccaccgctcccggcctgacagaacaatttcttaaaggagctctaatttactttttgatcacactcctaatataaatttaggagagaatggagtcttcagacacatctagttcaactctttcattttacatgtagagaaatctaagtggactgctctaatgctgggagtgtccaaaataaacttctttttggaaataatttcaaacttaagttgcaagaataagaatacaaacaatacccacataccttttgttaaccttttactccatctgctttgtcatttgcatgtgcactgtctgtctctgtgtgtgtgtatatatatgttttttattttttaattttttttatttttaagagatggggtctcactgtgtcacccaggctggactgcagtgacacaatcatagcccactggagccttgaattcctaggctcaagcgatgcccccaccttggcctcccagtgtgttggtattataggcataagccaccatgcctggcccaatctttactattaaggttgcaaaaagatgattccccccccaccccctgccaaatctagtgctctctccacatttactagttagcatttttagtttttattttaagttcaggggtacatgtgcagggttgttatataggtaaacttcttgtcacaggggttttgtgtacaaattattttgtcaccaagataataagcatagcactcgagaggtagtttttgggtcctctccctcctcccactgttcaccctcaagaaggccctggtttctgttcccctctttgtgtccatgtgttcttgtttttttagctcatacttgtaggtgagatcagagggtatttggttttctcttcctgtgttagtttgcttaggataatgacctccagctccatccatgttgctgcaaaggatgtgatctcattacttttttatggctgcatagtattccatggtatatatgtaccgcattttctttatctgttcacttttttacttattttttattatggacacaggaattcctattttttcaaggatttacgatttattagcatacataactagctaggttcatggattattccaaatttggccactgggagtcccttcaaatgggctcctacatccttatagcgtactctcatcattttttttttctttttagcatctccgtcctttttggcataactaaatactccaagtgcatcctgtactccccccgccctggaatcagccacttctctgaggagtcctggtacttttacaagggagtcatatcagagaccgagatcttttcatctactagaatatttttgcatcttggcccttttggctgacagaactaggaaatatatgcatgttatgtgctatatacatatatgccagtatacatacacacatgcacatttacgtacacatatacttcttttgaggaaatcatgagttcacattgatacctctaattcatcatcatgggcttttttcttgtctgcattaattcctcattcacatgtctctactcagtgagaaccctggctcccaacatcaatataattccactatcccctgccctcaaccccttgtacttaccaacttcattgttttctggtttaatctgtcccttaatcctttttgcaaagaaaagaggactgttttttactctaatttttttctttttcttttctctttttttttttttgagacagagcttcgctcttgtcactcaggctagagtgcagtgccacgatctcagcttactgcagtctccacctcctggattcaggtgattgtcctgcctcagcctcctgagtagctggaattacaggtgtctgccaccacacctggctaatttttgtatacgggatttcaccatgttggccaggctggtcttgaactcctgatctcaggtgatccacccgccttggcctcccaaagtactgggattacaggcacaagccaccgtgcctggcctctaatttcttataggaaagatagcatactatatatatgtgttcttttgtacttttaaaaaaattcttcaatcagcaccaggattgtacttttttcccctcacttaatagtatctcctggaaatactgtattagttggtagaggttgtcctcattctgttttttatagttgcataatacttcattgtgtggatatgttattattcaaataattgcttatacttggacatctaagtagtattttgcaattacatctaatattatatataaccttggatgtgtgtatttttgtattattggaaatgtatattcatggtaaaaaattcctggaagtgagattgctgggtcaaaagataatgcccctctatatgagttgtactattttgtattcccaccagtgatacgtaagagtgccccggctgggcgcggtggctcaggcatgtaatcccagaactttgggaggccgaggtgggtggatcatgaggtcaggtgttcgagaccagcctgaccaccatggtgaagcctctactaaagatacaaaaaattagctgggcttggtggtacgtgcctgtaatcccagctactcaggaggctgaggcaggagaatcgcttgaacctgggatgcagaggttgcagtgagccaagattgtgccactgcactccagcctgggcgacaagagtgaaactccttctcaaaaaaaaaaaaaaaaaagtgtctatattcccacagcctgactaattatattgtcaggcattgaaacttttgccaatctgatgggtgagaaactatatgtcagggtagttttaaattttatcttgcttatgagtgaagctgaacattttttcatatgtttaaggccattttatgtctcttttttttccccaaattgtctttgtgtctttcgcagcaggatctttggtcttttattctccctctcaattttttttttttttttaaacggagtttcactcttgtcacccaggctggagtgcaatggtgcgatctcggctcaccgtaacctctgtctcccgggttcaagcgattctcctgcctcagcctcccaagtagctgggattacaggcacatgctgccatgcccagctaatttttgtatttttagtagagatgggctttccttcgtgttggccaggctggtctcgaactcccaacctcaggtgatctgcctgcctcggcctccctctcaattttttaaagttgtttgcatactagggatttcagtgctttttttctgatatgtttacaaatattttcttaaagtatacttgcttttttactttccttatggtgtttttgccaaaaaaagttttttgttttctttttattaatgtagtcaagtttattaaccctttattgaatttgaatgatggttaaaaagcctcactcggccacacatggtggctcacgcctgtaatcccagcactttgggaggccgaggcaggcagatcacgaggtcaagagattgagaccatcatggccaacatggtgaaacgccatctctactgaaaatacaaaaattagctgggcatggtggcacacacctatagtcccaactacttgagaggctgaggcaggagaatcacttgaacctgggaggcagaagttgcagtgagccaagatcgcaccactacactccagccttccagcctgccagcctggcaacagaacgagagtccgcctcaaaaaaaaaaaagcctctctcttgtttcctgttatctcagtgaaaaattagataaaaagtctttctcttagattttaaaaaattttgaaataccttttgaaggacagttgggctctgtgtatcaaaaacctaaaaatgctcaataactgtacactcaacaattttagttctaggaaaatatatatcctgaggaacagatgtgaaatgtacatacaaaagaccgggcacaatggctcacgactgtaatcccagcactctgggaggctgaggcagacggatcacctgaggtcaggagttcgagaccagcctggccaacatggtgaaaccccgcctctactgaaaatacaaaaattagctgggtgtgttggtgggcgtaattccagctacttgggaggctgaggcaggagagtcgcttgaacccgggaggcagaggttgcagtgagctgagatcgcgccactgcactacagcctgggcaacagagcaagactccgtctcaaaaaaaaaaaattagctgggcatggtggcatgcacctgtagtcccagatactagggaggctgaggtgggaggatcactgagtctgggagggagagtttgcaatcagccaagtttactatttggaaataaaatacataagacaatatgtctacatatgtgatttctttttttttcttgagacatagtctcgctctgttgcccatgctagagtgcagtggcatgatctcagctcactgccatctctgcctcctaggttcaagtgattctcatgccacagcctcccgagtagctaggactacaggtgtgcgtcaccaggcccagacaatttttgtatttttattggaggtggggtttcgccatcttgaccaggctggtcttgaacttctggcctcaagtggtccacctgtcttggcctcccaaagtgctgggattacaggcatgagccaccatgcctggcatacataatttcaaaaattaaaaataataatgctctaactataataaaagagataaatacaagagaagtaatctatggtaaaacaatgcaatttataataaagcaatatgtatttcaatatgtttagacataattacaatagaagacatgatttaagtactagatacttgaacccatatgttgaatcactgtgcatatacaaatgcagaatgattcaagcgtgtcatgttggtgactaagaaacaccacaagctagaataactaaacgttctgaacaaaacaaaatacattctcctctagacttatatacaattgcctgtctggaaatttcagtgcatattaaaattctcaaaaatactttgctttatatataacatggaattagcttctaggtcatatgagatttttcattcacttgaatgtctggtgggacatttgaaagttgcacaggacacacaaaaaagtcaatttttattagaatgtattgagcattgtaggatacctagaatccctgttttaggggcctgcagaatgccagtggggcactggtcattgtggcaacaaaaaggtacctcctcagatttccaaatggctccctaggggggagttgagtacaattaggttatataatataattaatacaatggaatgttatttatccattagaaagaacaaggaaggtcaatgtgtattgtcatgaaaacatgtccgcaatttgttgtcaagtgaaaaaacatgtatgatattccactttttctttttcttttttttttttgagacggagtttcgctgttgtcacccaggctggagtgcagtggcgtgatctcggctcactgcaacctccccctcctgcgttcaagtgattctcctgcctcagcctcctgagtagctgggattaggcgcccaccaccacatccagctaattttttatttttagtagaggtggggtttcaccatgttggccagtctggtcttaaacccctaacctctagtgagccacccggctcagcctcccaaagtgctgggattacaggtatgagccaccgtgcctggctattttttctttttattatttttggtagaagcagggtcttgcagtattgcccagggtggtcttgacttcctaagctgaagcgatcatcctgccttttcctcccaaagtgctggggttacaggcatgacccacagagcccagcctctacttttgttgaatatatgtactatattatatagaagaaaggttggaaaaatatttttcaaaatgctaattgtggatgacatactttacagttttattttagtctggaatgttaagaacttacttttacaaagtaattgcttttttttttctttttgagagagggtcttgctttcttacccaggctggagtgcagtggcatgctcaaggcttactgcagactcgatctcagctcaagtgatcctcctacttcaggcctccgtatagctgggaccaccaagcatgcaccactgcacctgcctaattttgtggggtttttttttgtagagacatggtttcaccatgttccccaggctggtctcgaactcctgagctcaagtgatccacccaccttggtctcccagagtgctggaattacgtgcatgagccaccgtggcccgtgcagtaattgcttcttgacataaggatttaaaaaatcactttgggcctgcaatcctagcactttgggaggctacgccaggtagattgcttgaatccaggagttcaagaccagcctgggcaacatgggaaaaccccccctctactaaaagtacaaaatttagctgggtgtagtgcacatacatgtaatcccagctacttgggaggctgaggcatgagaattgcttgaacgtgggaggcagaggtttcagtgagctgagatcaagccattgcactgcagcctgggtaaccagagtgagacactgtctcaaaaaaaaaaaaaagaccacttttcaggagttcgagaccagcctggccaatatggtgaaaccctgtctctactaaaaatataaaaaattagccagtcgtggtggtgtgcacttgtagtcccagctactcgggaggctgagggagaagaatcgcctgaatccaggaggtggagcttgcagtgagctgagatcgcgccactgcacttcagcctgggcgacagagcaagactccgtctcaaaaaaaaaaactactttgctcagtggctgatgccttttttaaaaataggatagttggaggaaagagagaagcaagcttatatctaacaggaagtgaggaagagggtaacttggtagaagttggcacctgtcacttaatatacaataatttttggctcagcgcagtggctcactcctgtaatcacagtactttgggaggctggggcagaaggatcacttgaggctggaagtttgagaccagcctgagcaacatagcaagatttgttcttctgcattaaaatttaaaatgggggaaatggagtagctgcgcagtttcatatattgaatttgaagctactgccaggagtacatttttttctttcatcattttcttctgtgtctttttttttttttttgagatggagtttcgctcttgtcacccaggctggagtgcaatggcacgatctcagcttactgcaacctctgcctcccgggttcaaacaattctcctgcctcagcctcctgagtagctgagattacaggtgcccaccaccacacctggctaatttttgtatttttagtggagatggggtttcgccatgctggtcaggttagtcttgaactcctgagctcaagtgatcaacccgcctcagcctcccaaagtgctgggattataggtttgagccaccgtgcctactctctctatcttcttaaaaacaaataaagagaacagtgatcttcacttggaagagggaaaggtaccttgaagaacatttcttggactttagggaggcaaatactgttacagaatgtgagaaatcctgttccaggctgaacaaattaaattccttcatctaccttcaaagcttttcttctcttagattcttgtgattgatcatagagaacaattttgctaggttgccgtgactccagaggccgaatttggggcaaccagggacacatatatctgcatttttatgagttttgagagtttggattgtactccttgtcttcatagtttggagacataccactgtcattggagtagaagatctgctgtgttatgtacttaccatgggagaaagggaggaagcttcctgggtttcaattcccactcagagccaggtgtggtggctcatgcctataattccaccactttgggaagctgaggcaggaggacttcttaagaccagtgtgggcaacacagtgagaccctgtctctacaaaaagtaaaaatttagccaggcgcagtggtgcaagtctgtccctcctcttgggaggctgaggtgggaggaacacctgagcctggggagattgaagccacagtgagccatgatctcaccactgcactccagcctgggcaacagtctaagaccctgtctcaagaagactctgtctcaagaagaccctgtctcaagaaaaaaaagaaaaatccgaactcaaatataaaatagtatattccaaaatatgtatttagaagagacatgtatttagaggctagctgagtgtgatggctcatacctgtaatcccaacactttaggaagctgaggcagctcaaattcctggaaccgtttgagcccaggaattcaagaccagcctaggcaacatagtgaaactcttgtctctacagaaaataaattttaaaaaagtacccgggtgtggtggcttgtgcctgtagtccctgctagttaggaggctgaggtgggaggctcatttgagcctgggaggttgaggctgcattgaggcatgatcgtgcaaccacacttcagcctaggtgacagagtgagaccctatctcaaaaaaaaaaggagttttctcttatttgccccaactttttatagaaaagtcaaaagaacagtacaatgatgatgatgtgtttttttatttttttatttttttttggagacggagtctctctctgttgcccagactggagtgcagtggcgtgatctcggatcactgcaacctccgcctcccgggttcaagcagttcttctgcctcagcctcctgtgtagctgggactacagatgcataccgccatgcttggctaatttttttgttttttttttgagacagagtaagactctgtcgcccaggctggagtgcagcggcgcgatctcggctcactgcaacctgtgccttctgggttcaagtgattcctctgcctcagcctcctgagtagctgggattacaggtgtgcaccaccacacctggctaatttttgtgtttttagtagagatggggtttcaccatcttggccaggctggtcttgaactcctcacctcatgatccacccgcctcggccccccaaagtgctgggattacaggcatgagccaccgtgcccagccaatttttttgtagttttagtagagacagggtttcactgtgttgcccaggctggtctcaaactcctaagagcaggcaatctgcctgcctcagcctcccaaagtgctgggattacaggcgtgagccaccatgcccagctgattattattattattattattattattattattattattatttgaggcagggtctagctctgtcgcccaggctggagtgcagtggcacaatcttggctcacggcaacctttgccttccgggttcaagtgattctgtgcctcaacttcccaagtagctgggattataggctgcgcccccatccctggctgtttgtatttttagtagagacagggtttcgccaggttggcaaggctggtctcaaacttctggcctcaggtaatgcacccaccttggcctcccaaagtgctggaattacagggtaagctaatgtggccggcctacagtgattatttatatgcttgctacctagattcagcaattgttaacattttgtcagattttctttatattgtatgtgcaggtatgtgtccattttatgctcctggaaaaataagtttgggatattatgaaacttccagttaaaaatgtgtttgtgactgggcatggtagctcatacctgtaattccagagctttgagaggccaaggcaggaacattctttgaacctaaaagttcaagaccagcctgggcaacatggtgagacatcgtctctacaaaaaattaaccaggtgtggtggcatgtgcctgtagtcctaactacttgggaggctgaggcaggaggattgcttaagcccaggagtttcaggttacagtgagctattgtcaagccactgcactccagcctgggtggcagagcaagaccctgtctctaaaaatatataaataaatcaacaaacaaacatatgcttgtaaatttctctgcagggttcatatctacgtaaatgctgtgtgaaagggaacaatgctgccctgaagttaaaaggatcataatttttgcttttttttatttgtaatgagctcatcttgtctccatgaacttttcagcttagctcactacttgtgtggtcatttggggattttcacctttttgcacttaagataaccgtaaggtggtctgaaatgtgcatttgttttctgtttgttctagatgatccctctgataagccaccttgccgaggctgctcctcctacctcatggagccttatatcaagtgtgctgaatgtgggccacctccttttttcctctgcttgcaggtaactcactaatgctggcttctcctagcctagttttatgctattttttatgatgtaatatttcggagattactgtcaactgctaaggagatctatgtcttattaaatctattccttccaatttttctttttctttctttttttttttttttgagatggagtctcactcagtcgcccaggctggagtacagtggtgtcatctctgctaactgcaatctccacctcttaggttcaagcgattctcctgcctcagcctcctgagtagctgagattacaggcacacaccattatgcccagctgatttttgtatttttagtagagacggggtttcaccatgttggtcagggtggttttgaattcctaacctcatgatccatctgcctcagcctcccaaagttctgggattacaggcgtgagccaccgcacccggccccaatttttcattatacgttttaccagtgaaaagttgagaaacagagcagttagatgagacagactgttgattagtccacatctgtgtttaaacctaatacttggccgggcacagtggctcatgcctgtagtcctagcacttttggaggctgaggcaggtggatcccctgaggtcaagagttcaagaccagcccggtcaacatggttcaacatggtgaaatcccatctccacaaaaataaaaaaaaattagctgggcatgatggcgggtgcctgtaatcccagctacttgggaggctgaggcaggagaatcttttttttttttttgagacgaagtctcgctgtgtcaccaggctggagtgtagtggcacaatcttggctccctgcaacctctgcctcccgggttcaagtgattctcttgcctcgcagattgcactccagcctgggcgacagagcaagactctgtatcaaaaaacaaacaaaaccctaatagttaacactgttttttttgttgttgttgttttgttgagacgggagtttcgctattgttttccaggctggagtgcaatggtgtgatcttggctcaccgcaacctctgcctcccgggttcaagcgattctcctgcctcagcctcctgagtagctgggattacaggcatgcgccaccacacccggctaattttgtatttttagtatagacagggtttctccacgttggtcaggctggtcttgaactccagacctcaggtgatctgcctgcctcggtctcccaaagtgctgggattacagggcgtgagccaccgtgcccagctattttttcttttttttcttttccacgacagagtcttgctctatcacccaggctggagtgcagtggcgtgatctcggttcactgcaagctgtgcctctcgggttcaagggattctcctgcttcaagggattctcctgcttcaacctcccgagtagctgtggttacaggtgcatgccaccattcccagctaattttttatatttttggtagagatggggttttctcatgttggccatgctggtctcaaactcctgacctcaagtgatcctcctgcctcagcccccaaagtgctgggattacaggcgtgagctaccacgcccggccataacactgtttttttaagttaatttaaagtattgaaattacaggaaacataactggaagattattccttttgatgacactgtttattgtcttgttgaagactgatctctgtacagatgacaagggaagaaacaatttttgtgggtgataatggtaataataatactaattataagtacttgctctgtcccaggcaccactttgagtactttacatgaattaacccttaaatcatcactgtaatcctatgaagtacctatgattagtatccccattttatagatgaagaaatttaggctaagagaggttaagtaacttgttcagggtcacacagcaaataccatattttatcagatctaagacaccattgattataagaagcacctcaatttcagaaatgttaaaatgtaaaactggctgatgaaagttgtgatgtactttcgattataagatgaatcttgatttcagagagtttttttatttttttgagacagggtttcactgtgtcctctaggctggagtgcagtggcatgatcatggctcaatgccacctctatcttccaggcttaagtgatccttctacctcagcttcccaagtatctgggactacatgcttgtgccaccatgtccagctaattttttttttttttttttttctgtggagaaagggtctcgccttgttgctcaggctggtctggaactcttgagctcaagcaatcctatcacctcagcctcccagaatgctaggattactccaggcctacttcagggactttttatttttctttaaaaaaaaataaagaattttttttagagatggggtcttgctctgctgttcagcctggagtgcagtggtataatcatagctcactgcagcctcgacctcctgggctcaatgatcctcctccctcagcctgccctgagtaactaggtctatgggcacaagccacaatgcccagcccagagtttaaaatatgaaacaatatttatcttagaatggctgaaatacggtttcagagccaggattcaaatttaggctatatgattgtgattccagggcatatgctctcctcaaagagttgtcttagaaaaaagtatttttttcagacttgttttttctccatgagggccactgaaaagctgtgatcatgattccaccattctattgcagctgcagacaagattaaatgaatccttaaaaaattgttgtccgggctcggtggctcacgcctgtaatcccagcactttgggaggccaagaaaggtgaatcacaagatcaggagttcgaggccagcctggccaaggtggtgaaatcccgtctctgctaaaaatacgaaaattagctgagtgttgtgccggctgcctgtaatcccagctactcgagaggctgaagcaggagaatcaacttgaacctgggaggcagaggttgcagtgagctgagatggcgccactctagcctgggtgaaagagcaagactccgtctcagaaaaaaaaaaaaaaaaaaaaaaaacttgtcaagaagtggtgtggtggcccacacctgtaatcttagcactttgggagactgaggtacaaggatcccttgagcctaggagttcaaggctgcagtgagctatgatggtgccactgcacttcggcctgggtgacagaacgagaccctgtctccaaaaataaaattttaaaaacccaaacttgtcagaagaataacacaaacctcctctgtcctttaagaaagtagcttttgctaatttaatttttctttctttgcagtgtttcactcgaggctttgagtacaagaaacatcaaagcgatcatacttatgaaataatggtaatgatgaagttgctgggaatttctgttcactttttttaagaattagactgggaagtagtttttcttttccatttttctttaagctctcttggacttcagggaattagttttcttaatctctgagtatctttaccttttctccccttcggaaataggtaattgttatccaataagttttttagggttttgtggatctatcaaggtatttaagcacaaaaatagttttatatactcagatttttgtttgaaatttggaaattattcaaaggaaatacttttgatatgaggataacaggtatgctgctttttaaactcattgataaacatagccaatgtgttgtcactgtgtgctcatggtatttttatgtggttcatgtggacagtggtgtttttgttgagcagttcattcccttgccttggggaaattagttaccttctgagagtcaggttataaagtgaacacagcaaatgaattaatacataaaatcactgaagaggcagactggtttataagcttgaataaaacttggctatagcttaattgtaatgccacacttaaagaaggaataagagtgttcgtagtgtccttccaagccctggccatgggagtgggtggtttaataagccaaagtgaatatccagtctgcttgacgggtatatatacctttgtcaagatagttttgttggccaggcacagtaactcacgcctgtaatcctagcacttccagaggccaggttgggcagatcacttgaggtcaggagttcaagaccagcctagccaatataaggtgaaaccctgtctctattaagaatacaaaaattagctgagtgtggtgatgtgcacctgtagtctcagctacttgggcgtctgaggcaggagaatcgcttgaacccaggaggcagaggttgcagtgagccaagatcgcaccactgcactccagcctgggcgacagagtgagactccatctcaaaaaaaaaaagacagttttgtcagttatcagaacatattaagcatataactaaatctcctacttcaagcagttttctgacatttggcccccatgcagttgttcttacaggaaaggatcctggcaggcttgacagttaaaatttcacatagtagattaatctatattttctatcgatgctgcaacaaattaccaaaaattagatatcttaagacaacacaaatttgtctcacagttctgtggatcagaagatcattaggctcagctggtttgctccaggttccataaggctgaaatgaagatgttggccagcctgggctctcacctggaggccctggggtagaatccacttctaggttctttcaggttgttggcagaattcactgccttaaggttttaggaaggatgccactgttttgatcagggcatgttctccgtttccacaggctgtctgcattccctggctctgggccccctttctccatcctcaaagccaggagcacaggaagtccttgaggttgttgatgaaatccagggaatctctatgacctctcctattgccttatctttcctgtgctgaatctttatgagtgattcttctgctttcctcttctactttgagacagggtctcactctatcacccaggctaaagagcagtggcacaatcacagctcactgtaacctcgacctcccaggcttaagctatcctatctcagccacctgactagctgggactataggcacaagccaccatgcctggctaatttaaaaattttttttgtaggccaggcttggtggctcatgcctgtaatcccagcactttgggaggccgaggcgggtggatcacaaggtcaggagatcgagaccatcctggctaacatggtgaaaccccatctctactaaaaacacaaaaaattagccaggtgtggtggtgggcgcctgtagtcccagctactcgggaggttgaggcgggagaatgatgtgaacccgggaggcagagcttgtattgagccaagattgtgccactgcactccagcctgggcaacagagtgagactccgtctcaaaaaaaaaaaaaaaagaaaaagaaaaattttgtagacaggggtctaggggcctttctatgttattcaggcgtctaggggtctttctgtgttattcaggctggtctcaaactcctgggctcaagtgatcctcccacctcaaccctcaacctcctaaagtgctgggattacaggtgtgagccaccacagcaggcacctcaactatgtataaggactcatgtggattacattgggcctatcagggtaatccaggatagtctctctactttaaggtcagctgattagtaacctttattccatctgtaaagtcctttcccagcagtacctcgctagtgtttgatggactagtcagaagacaggaatcttaggatgaggggaacatctttatttttattttatttatttattgaaaaaaaaaatagagacagggtttctccatgttgcccaggcaggtctcgaactcaggggttcaagttatccttccacctaggcctcccaaagtgctggaattatagacatgagccaccatgcccagccagagaacatctttagaattgggcctcctacagcactgcagtatatttacttcagtctcttaaaagtttagaaagggtgaatcagcatctctgagcctgactattggtggagtcctattaaaatgagtttctgggcttataatattcagggtcagattctaggccacaatgaattaatcaaagaaccagttagagttcttgggagccaactaactagccttcctctatccatctctaaacaatttcagtcttttaatggcttcagtaattgtaagacttggaataaattttttccccctttaaatgcaaaaatgaagggttaggagactgttcaaagtagctgtggatttgagttaatttcaccaaggttatcaggtcttcagaaagctggtttatttttcccaaattaatgcgagaatacctagagccagaatacaaatttattcattcacattgtgaaataactccttaagggataattcagtatagcttgggtaggttggtagtcatgcttattcactgtaggaaagctgaccatgagctttctttagctattctggcatcatgtcttcttcataatgctgaaagcactgactaagtttcactccacatcacttcattctgattacatcatccttttctcacgtattcaacacccatacaatcacatttcagagtactgtcctttactttggggagcttttgggggttactaatacttcctttttgtggcccatcttatttattcccagtgaatctttccttctataggcatgatgaccaaattttagctttctacacaaaacttgatttttttgcctcagataactttaaatggttttcagtacttttgtcatgtcacagagctgtatttttgggagttactcatgctgtggtaggtggtgtgttaaccaggatttctgaattctatgcctatttttgtcttgtaattcttagaactttgaacaagtcaaggcagctctttctgccacacccttttataccagtgattcttaaacttcagtacataagaactgcctgggagcttcttataaatgtagatttctagactcttctgtgagagattgtggttcagaagtgctgaggtttggtccaggagttgaataatattaattcaactttttgtaaaactgccttgtgccttctttggtgtgtctgtgatgtagaaagtttttattgtttatctcacagtaaagttggttgagaaacaattaatattctaaaatacagttttacaaatgacagtctcttcaactaatgtgtgtgttgtcatatttacatgtcttttggtacttgctgaattgagagtgattatgaatttagtatagatatagactctgaaatttctctgttggatttcataatacctcatgtgctagatatattcgtagtacgtgctcagatgaaaatgtgttgcttattggtagtgtaatctcacaaatcatgactttttttttgtcattaacaaaaggtataacaagttctaagtgcctgtgtaatctgaagacctcctgtgtggtcttcagattattttttttttacttgttattatagaaaagttcagatatacacaagagagaatgatgtttggttatctattgctatgtaacagctacctcaaaacctcatgcttaaaaatgaccattttattatctcccacagttttgtgggtcaggcattcagattaggcacagtgagggtggctcttggctccacatgatgtacttaggctgaaagtcccaagagggttatgaatttagtataggcatagactccaaaatttctctcttggatctcataatacatcatgtgctaggcatattcatagtacgtgctcagatgaaaatgtggttgtcattgtaaccaactactacataatggtaataaatttccgtttacccatcactaactcttaaaattattgactcgtggccaatcttactttatctaaaccatcaccttttcttttatcttttcttttttttttttttgagacagagtcttgccctgtcgcccaggctggagtccagtgggttgatttcggctcactgcaacctccgactcctgggtccaagcgattctcccgcctcagcctcctgagtagctcagattacaggcacacaccaccgtgcccggctaatttttgtagagacagggtttcaccatgttgtccaggctggtcttgaactcctgacctcaggtgatctgcccacctcggccacccaaagtgctgggatgacaagcgtgagctactgcacccagcctaaaccatcacctttctagattattttgaagcaagtatcctagacagtatatcatttcatctttcagtatttcattaggtctctacgtaattctagtcacttttcacattccccgtcatttcataaaggcttaatatctaaaaccctgctgccttttttacccttgaaacaatcactgttctgatttttttttttatcagcgtagattggttttgcatattctagaactgcatatatatggaatcatactgtatgtacacttctgttgtttctggtttctttcactcagcttttttatttatttatttattttttttttgtgacagtcttgctctattgcccaggctggagtgcaattgcacaatctcggctcactgcaacctccgcctcccgggttcaagcagttctcctgcctcagcctcccaggtagctgggattattataggcgtccaccaccgcgcctggctaattttgtatttttagtagagacggggtttcaccatgttggccagattggtctcgaacccctgacctcaggtgatccacctgccttggcctcccagagtgctgggattacaggtgtgagccaccgcgcctggactcactcagcatgcttttgagttttattcatgttgtgtatgttactggtacatttgctactaatcatttcttttaattactgagtaatattctgttgtacgaacataatacagttttttatccattctccctttgatggacacctgggccttgcccacgtttaggctattgtgaataaagctgcaatgagtattcttatataaagctttctatgtacatatgttttcactgttttttggataaatacctaggagtgaaattgctgggtcatagagtaaatgattgtttaacttttaaataaacgattggcaagttttccaaagcatttatatcattttacacctctgtcgacaatatatgagagttctgattgcttcatgtgcttgccaacatttggcattgtcagtttcattcattttagctattttagtcagtgcagtgtggtattgtggtattacaatttttttttttttttttttttttttttactttttgcagtttgtttaattcagatacaaataagattcacacatttcaattttccaattggttgccttttatgtattttctattctgtatgggttttccttccctttctctcatttcttttttttggtcttattttagaataattattttttaaattttcttcttaaaaatatagggaaatagaaatagagttttgccatgttgtccagggtggtcttaaactcctggactgaagggatcctcccaccttggcctcccagagtgctaggattacaggtgtgagccaccgtgcccagccatttttgggtttactgaagttgcaaatgtagtatagagagttcccatctatccttcatcctgcttccccaaatgttaacatcttacattatagtacatttgtcaaaattgagaaatgaacattggccgggtgcggtggctccttcctgtaatcccagcactttgagaggctgcggtaggagaattgtttgagtccaggagtttgagaccagcctgggcaatctagaaagaccccattgctgcagaaaaatttaaaaattaggtgggtgtggttgcacatgcttatattcttagctacttgtatggtggaggcaggaggattgcttgagttcgggagtttgaagctacagtgagccatgatcacaccagtgcactccagcctggtcaacccacaagaccccgtctcaaagagaaaaaagggctgagctcggttcctcatgcctgtaatcccagcattttgggaggccgaggtgggcggattacttgaggtcgggagttcaagaccagcctggccaacatggtgaaaccctatctctactaaaaatacaaaaaattagccaggtacagttgtgtgtgcctgtaattccagatgttctggaggctgaggcaggagagtcgcttgaacccaggaggtggaggttgcggtgagccgagatcatgccactgcactccagcctgggctatggagcaagacttggtctcaaaaaaaaaaaaagtggggggcaaaagaaatgaacattactacaatactagtaactatagattttattcagatttctccagattttccacaaatgtccttttctgttgcaggatccaattggggatcccacattgcatttagtcataatgttttctccaatctatgacagtttcttagattttccttgttcatgaccttgacaggtcgaagtgtattttgtacagtgtctctcaattttgtcttcataggtttgatattttatcatgattagatttggattatagatgtttaggtggaagatcacagaggtgaattgccttctcattttatcatatcagacgatacataatttaacactggtgatgttgaaaaatgagcagccagccacaagagatgcatgaggcagggtgtatgtgggaaggggtacggagctttcctgtcctctctgggtacaccgccctctacctccatgtgttcagcagcccggaagctcctcgctctcatttcttattattcgtttgatttttaaaagctggattgtttgtcttacagatgttagtacagtctggattctgttgactaatgtgttcctctctcttctgtgtttcctataaattagtagttacatttaatgactacttcagattcatttaggaccattgtctggatctgctaattcaccaaggattgcaaaacattaatcttttaattctatcactcattttaatttatgagttagaaatttcttattattgtgtggtcccttggagtaacgtttatacaggaaaggaaacagaaaagatgattacttccctttatttactagttttgagaatatgcattggttccctagcatcctctacatatttaaatatttgatgtttcagtcctttgtggttattatacttattgatgctcaaaatattccatttttagttaacaggagtctctggaagttgacttctgaatttttttgacatgacctttatagtctttaagagcttctttgctgccaggcacggtggctcatgcctataatcccagcactttgggaggcccaggcgggcagatcacctgaggtcgggagttcgagaccagcctgaccaacatggagaaaccccgtctctactaaaaatacaaaattagccaggtgtggtggcacatgcttgtaatcccagctactcattgctactgggttggtcatttttcctggaccttttcaatgaacgatgttaggaaattatttttcttgtaagatacaacacatgagttcataataaaactttcaatttaaatacgagactacaagagttttgtttgtttgttttctgtttgtttgtttgtttgtttttgaaacggagtctctctctgtcccgcaggctggagtgcagtggcgccatctcggctcaccgcaagctccacctcccgggttcacgccattctcctgcctcagcctcccgagcagctgggactacaggcacctgccaccacacccggctaattttttgtatttttagtagagacggggtttcaccgtgttagccaagatggtctcgatctcctgacctcgtgatctgcccgccttggcctctcaaagtgctgggattacaggcatgagccactgtgcccggcctgtttttggtttttatgagacagagtctcttgcccaggcgggagagcagtggtgcaatctcaactcactgcagactctacctcccgggttcaagcgatcctcctgccttagcctgccaagtagctggaaccacaggtgcgcgccaccatgcccagctaatttttgtagtttttgtagagacagggttttgccatcttgcccaggctggtctcaaactcctgagctcaagcaatccacccacccaggtctcccaaagtgctgggactacaggtgcatgccaacactcccagctaatttttgtagtttttgtagagatggggtttcactatgttgcccaggctggtctcaaaactcctgagcccaaaaagtccacccacccaggcctcccaaaattctgggattgcaggcatgagccaccatgcctggccaactacgaggtttttacataacctcacagatcttacagctatatcttttttttttcccaagccaaaaattatacttcccaatgacactaaccaacgtaattatttatttgctttacctcataacatatacacatacactaatctcaaaataactgtcaatactaaagaaacattttaagatttggcaatttcttttgtttttaaggtatatcctacttagagatatttagtcaaattaagtgtttcaaaatcacttgaaatagttcctttctgtgtgattatgccttcaaattgatttctgagttcgttatattttgcattttattcttaagattttgaagtttatttttatttttattttttgagacggagtcttgcttgttgcccacgctggggttcagtgctatgatctcggctcactgcagcctccaccttccagttcaagcgattctcctgcctcagcctcccgagtagctgggactacaggtgcgtgccaccatgtccggctaatttttgtatttttagtagagacgaggtttcatcatgttggccagccttgtcttgaactcctgacctcaagagatccacctgccttggcctcccaaagtgttgggattacaggcgtgagccactgaggccagcctaaagtttaatattatactctttatgtttcaaagttaaatctacaagcaaggaatattcagagacatctagcttctggatagatgtctctaccctgttctctttcttcctccccatagtaacctttttttttttaaagtgtgttttattcttccatttaaaaaaatacatacatatttgtcttttcctctttcttagctaaatgggagcgtactgaaatatttatctctacctctgtgttaagtttaaaaatatatgtatatctgcatgaattgcttggcatttataggtgatatggaggcccttctagctaatggtggaaacgggtgggagaggtggacaactaataagaatgtaccctgggtatctctcatcattcggctgtaaactattactacagttgaagttcctagattccatttatttttaattttttttttttttttgaaacggagtcttgctctgtcgcccaggctggagtgcagtggcgcgatctcagctcactgcaagctccgcctccgcctcctgggttcatgccatcctcttgcctcagcctcccaagtagctgggactacaggcgctcaccaccaggcccggctaattttttatatttttagtagagacggggtttcactgtgttagccaggatggtctcgatctcctgacctcgtgatccgccctcctcgacctcccaaagtgctgggattacaggcgtgagccactgtgcccggcctatttttgatttttgagacagagtcttgttgtgacgcccaggctgaagtgtggtggtgtgatctcagctcactgcaacctctgcttccgcagttcaagtgattctcctgcctcagcctcctgagtagctgggactacaggcgtgtgccaccatgcccagctcatttttgtgtttttagtagagatggagtttcaccatattggccaggctggtctcgaactcctgacctcaggtgatccgcccgcctccgccttccaaagtgctgggagtataggcgtgagccaccgtgcctggcccctagattccatttgtatctctgttcttaagcaaaacttttttctccttagacttcagattttcctgtccttgatcccagctggactgctcaagaagaaatggcccttttagaagctgtgatggactgtggctttggaaattggtaagagcttggtgttaagagttgtcctgccctagtggactcagagaagaagctgttgttgaagagtaaaggaaggaacctcaggaagagaaagtatgtgttgctttcctatcaacccatgatttagaggcaagttagtcccctctgtacattatttttccagtgtcgaaatgtgtcacgaggatatgggatgtttagcggtccatgactgagcagctttaaaaggccactttggatgtatcaacagtgggaagattgattattattcctttctgaatagtagggaagtttagtttcgttagttattactcccttctgattttatgaatttttgttagttgtagatgccctagtcatttaagtgaatcagactttagctagatggtcatacgtaagattcaagtttcacagacttcctgatagcattctctgtttttagctttcaaacacctacctgccttagtccaaaaccggcggaattgaatagcacttattgctgttgacctagggggcagcaccacttaatactaccactttcgtttttatcttttgggaacactttcatatggatgcttttattttatgaactagatagcagaggcattattgaatatattttgttcacaaattatctgaagcctagggggttgaaatgatttcttgtgattacatagcttattactgaaggactcttaattaggtcctccctgtcctgacttactagtgtatataacctttcttggtgttcatcagaataaactctgctgcctgcctcccttatgtccagggacctgaagaaggagacctgaatttagttcacattttgcttgtattcattcattcagtatttattaagcatcataaaatactgtgtacaatgagaaataccaaaggaggtagaaaagtaatcacttgtgaggagtttgctagtcatctttggcctagtttttcattttttgcttaccattctctctaaaatagtctaaacctctctgtcctccttccctcttaacaaagaacataaaaaagacatagcttctctatccgctgtgggtaaggcactaagtttggcagtgagtgggctagagctaagaattatgagatgcatcctgtcttcagaaagcttatagtttagcaggggacttaaaaatacaagtgattgaagtacacaaaacagcacagtgatgccttaggggaggtcaagtgaaatgctgtgaaaaagagaccttgaggaaaggacttccacctgtacctctccattaccttggctcaagtcagggatttttttttattgagacagtctcactttatcacccaggctgaaatgcagtggtgtgatcacagtcactataaccccgaactcctgggctcaagggatcttccctcctcagactcccaagtagttggaacaacaggtgtgcgccaccatactcagctaatttttaaattttattattattattattatttggaaacaggatcttgctctgtcgcccagggtggagtacaggggcatgagcttgactcatttcagcttcaaccttccaggctcaagtgatcctcccagctcaggctcccgagtagctgggactaccggcgtgtgcaaccacccctggctaatctttgtattttttgttgagataggattttactgtgttgcccaggctggtctcgaactcctgagttcaagccatcctcccaccttggcctcccaaagtgctggaataacagatgtgccccaccatgcctggccagattcttaagcaagtttcttaattattttgggcctcatttttccttctttgaaattgagatagtaacaatatccataccacaaatttgatactaggtttaacttaaattctgttgtgaatgtttctagctcagtgtctggcatctcatagcagctctagtaaagaaatgtttatgttaagtgtttggtaaaccgtaaaatattaggcaaaataaaactatatttctgtatattttgaatgttctgaagtcacttcttattatttacagcaattatttctgtagggcctagctcacaggaaaatttacaaattttccagtcatctttatttatttatttatttatttatttatttatttattatttttttttttttttgagatggagtttcgctcttgttgcccagactggagtgcaatggcgtgatctctgctcactgcaacctttgcctcctgggttcaagcaattctcctgcctcagcctcccaagtagctgggattacaggcatgcatgcaccaccacgcctggctaattttgtatttttagtagagacagggtttctccatgttgatcaggctggtctctaactcccaacctcaggtgatccacctacctcccaaagtgctgggattacaggtgtgagccactgcgcctggcctcagtcatctttctttaagtggaaaagaaaggactttttagtcattatttctgtgttttagactagcaagatatggaacaccagattacaccaatctaggcttatatttatgtcatttttctgctgatatctttttgatatcaatttggaaatatgagagtatattatatggatgtgacttaaaatatgaaaagagcaaatgatgcttttagtattatgtgtaaatacaagtaccacttctctctttttcccacaatcctctaggcaggatgtagccaatcaaatgtgcaccaagaccaaggaggagtgtgagaagcactatatgaagcatttcatcaataaccctctgtttgcatctaccctgctgaacctgaaacaagcagaggaagcaaaaactgctgacacagccattccatttcactgtaagtgcctccctatcttgataagatatacttagctcatccttgggccctgtttcagtagcagataaagagtgatttgatgacttggacagctaatgatatcacggaagataggaggagttagtatggcagctattgagagtcaggatcgacccagcatggtggcttgtgcctgtaatcccagcaccttgggaggctgaggcgggtaaatcacttgaggccaggagttcaagaccagcctggccaacatggcgaaaccctgtctcaactaaaagtataaagattagctggacgtggtggcagacacctgtaatcccagctactggggaggccaaggcaggagaatcacttgaaccgggtaggcggagattgcagtgagccaagatcacatcactgcactccaacctgggtgacagagtgagacttcatctcttaaaaaaaaaaaaaaaaagagtcaggattataatgtggcaaagaaggaacatactctaagggtcagagttctatacaggacatcaaggtgcttgaagccaatgtgtagttccacctaccttgagtcctttgaacatatcagttaacttagtgctttcctttgtaaaataagatgtcaaaaagggaaaaccttttctatgctattatgagtgcaagttttttttcaatccctttggagagcttatgattatacatatgagttgcttagagaatacagtatttgactcattattattaattgccttggtgtcaagcccaagaatcagtttgttatttttgttcgcttggttgtgtcagtgatggcgaactttttaatctcatgtgcgtgtgggaccagtgggtctcttaataaaatataaccaaaaacatgatgaattataaatgaccatctttcctgaatgactctcagggtacaagtaatgagatatgaatgttttcacttcccttttctctttcctcatactctctagaaacagttttatagctgactaacttaaaggctggtaatacctcctttttttttttttttggagacagagtctcgctgtgtctcccaggctggagtgcagtggcacaacctcggcttactgcaacctccacctccagggttcaaacgattctcgtgcctcagcctcctgagtagctggtaccacaggtgcatgccaccacacctggctaattttttgtatttttagtagagaaaaggttttgctgtgttggcgaggctggtctcgaactcctgaccttatgatctgcccgcctcggcctcccaaagtgttgggattacaggtgtgagccaccgtgcctggttgatacctcctatttggatagcactttggtgttagcactttgttctcaaatccattagaccatttgtttcctaacagcaacccagtgagataggcagagcaagtgcttttgttttacattcgagaagaccgatgcagacaggttagtttgtgcagggtcatgggactagtgtgtgttggagctaggacttaatttcagctaacttccaattccagtgtttgtttttttcccgtcttttttttttttttttttttttgcctctcagttggatgagttttgtaaattgaagttcatcctaagggataagggagccgaagccaacggtaaatatttaggttctgtaatattaaaggaaaaaagtcatgatttcctttcattttaggaaagcagaaatcagaagaaatttccccatatttacttaaaggattgcctgagtcttggtttttctttttaaaaaacctgttttcataatactttatctttttcacatttccttttataaaaaccattttaaattttatttattcttggactattatgtcatttttttcatgccaatattgtattagttaactcagaaaccttctaaattcttccagctacagatgaccctccccgacctacctttgactccttgctttctcgggacatggccgggtacatgccagctcgagcagatttcattgaggtaggataaatgtgtttttagcacaaagtaggaaaaattcatttttgtttctcatgagccttctgtctcacccatagattccataccactaaaaggagatttttcaaggcactataatttgtaggacctttaggcagccacattttcttaggtttgagtgccttttctcatttgtaaacattttcacatatggaacagtaaaaattctttaaacaaacaacctatttctggccaggctcagtggcttacacctgtaatcccagcactttgggagctgagaatggaggatcgcttgagtccaggtgttcgagactagcctgggcaacgtagtgagaccctgtctctacaaaaaataaaaaattagctgggtgtggtggtgcatgcctgtagtcccaactacttggcaggctgatatgggaggatcacttgagcctgggaggttaaggctgtagcgagtggtgatcattccactaaactgcaccctagacaacagagtaagaccctgtctccaaaaaacaaaaaaaccccagcaaacccacctcttaagttgcatcagtgctggcttccacttccttaggtatgaaattcctatagtctggttctttttttttttttttgagacagagtttttgctcttgttgcccaggctggagtgcaatggcatggtcttggcccattgcaacctccacttcctgggttcaagcgattctcctgtctcagcctcccaagtagctgagactacaggttcctgccaccatgcctggctaatttttgtatttttagtagagatagggtttcaccatgttggccaggctggtctcaaactcctgacctcaggcaatccaccagcctcggcctcccaaagtgctaggattacaggcgtgagccactgcacctggcttgtagtctggttcttattgtacatctaggggctttcaagattgtactgtatcaggggttgacaaacttattctattaaaggccagatagtaaatattttaggtttagtatgctataaagtttctattgtaactatactttgtcattattgtgctaaagcagcatgggataatataagaataaatgaatacgcctgtgttccagtaaaactttatgtacaaaaacagacagtaggctgaatagtagtttactgattcctgtactatatccacaagtatataaagaatgatgaatgtgtataaaaactatatgttccttgctcagctatggaattaaaagacatgtgaatgtagccacaagtctcttgatttatcatctaattcacaacttgaaagatagtttggccaaatgcggtagcttacacctgtaaatcccagcactttgggaggctgaggcaggcggattgcttgagctcaggagtttgagaccagcctgggcaacatggcaaaacgctgtttcttcaacaacaacaacaaaaaaaacccgaaaccaaaaattaacttgagtgtgatggcacatgcctgtagacccagctgcttgagaggctgaggcaagaggatcacttgagcctgggggttcgaggctgcagtgagccaagatcacaccactgcactccagcctgagtgacagagtaagaccctgtttccaaaaaaaaaaaaaaaagaatgaattgactttatttatttatttcagagacaggctcttgctctgtttcccaggcagtcttgaactcctggtctcaagtgatttttccacctaaatctcctgagtagctgggattataggtgcatgctactgtgcccagctcagactaattttagtttttagagcagtatgtttagcttcattcctaaactcataactattccaattttttgttgtcactactgcttgtaagcctcttagatttttcccatgacttcctattacctgtgccagtattgtggccttttgccatatttagactttttaaacaactgtttgcttgtgttttttctgtttacttctaaagcatggctgctgtaaagacactaatcaaagccgatgggtttggggtggggatttttttgttcccctaaacaggaatttgacaattatgcagaatgggacttgagagacattgattttgttgaagatgactcggacattttacatggtaacagtttattttgtcaaatgtttatcgagcgccaactgtgtgatgacactgtcttgggtgctaggaattgaaggatgaatagaacatgtcccctgcccttatagaattcagaaatctagtggttaagttgctgaacttactgtgttgttggattttgaccacagtgaataagacttgtgatgagggtaaaaatattgattatataatagtagtaggaaatatctgttggactgtgtgattttacttttatctgaggtaaatctacactaaggtaattggttaaatggccctcacttgcattcttagaaggaagggaatcagtttgaattcttgggacttcactagcaactgctatcactaaatgttcactatattttgttacccggaatttcccctagcaaggaaaaagaatggaaattcctcaagagtttttaggcccaaatggggaatttcttgtttctcaggactgttgaattttcaacactgctggattcttttttatgtttgtttttgagacggagtctcactctgttacacaggctggagtgcagtggcgcgatcttggctcactgcaacctctgtctcccaggttcaagggattctcctgcctcagcctcccaagtagctgggattacaggtgtttgccaccatgcccagctaatttttgtttttttattagagatggggtttcgccatgttggccaggctggtctgcaactcctaacctcaagtgatctgcccgcctcagcttcccaaagtgctgggattacaggcgtgaaccaccacgcctgccccagcattgctgaattctaatctttgattagccctctaagggtttatgttaactcttttcctaaaacttatgtggtgaatgccaaagagctgttaagagtagatagttagactttgagtcccttttttccttctttccattttcagtgaactacatactaatatatactaatactacataataatacccaatactttttttttaattttagttcagaattgaatatgatacagtagatcagtaattctctattggaatctgtatttcccaaagagcatcttcatgatttctgttaaatttacatcccaggcaggaaagacaagtagagtatacttgttaaattataaatcaagttttcatattgcatggactggtacactgtccctagaaggggaacttgattcttttctctccatagaagagctgcctggatatttgttataccagatctaagataaagaaatagtcttcctaaaaattttaccttaagaaatttttctctacacatttcttgagcggtgggtttttttttgggggggttttttttttttttttggcaacattttattcctccttttctcccacacaactttaaggaaagtcaaagtgacgcagattgaactaaaagaggaaagcttgaaagcaaactactttagcattaactaaatccattgtatttgttcagtcttccgtgtcagtctcgtcaatcccagtgactcatgttatcttttctcacctcttgtggtgttccctttgaaggtagtatgcagactgccattcatagacaccagctttaattgaaatggtattgttttctggcttgtatctttcttatagaatgccagactactctgcacaaaaggggcagcttcataaatatcattcttttagattctgctcaaaaataccaaatttttggctgggcatggtgggtcacacctataatcctagcactttgggaggccgaggctggctgatcacttgaggccgagagttcaagaccagcctgggcaacacagtgagaccctgtctctaaaaaaaaaaacctttaaaacaaatttttaaaatattattattgtttttcctcctcctcctccctgctttttatttttacctatatatttattttttacagaattttaaagtcaacatctataatgttaataatggcttgacttggtgaatcacttctctagagcctaatccaaggtcttcattcatacttctcaacattattaagaaaactatagtaatggtcggtgtttaatttcattcttcattcttcatgggagtaggacttgcagttccttctggttcacttggggtcctttttgtaattaagtggggataaaaagaaacagaagcaactgattgatcagcaatttatagttcagttagcttttcaaacccataacatactttaggtatttgtactctccctgaagtttctatagccctgtaaattattgattttcatttgagctataactggaacttatgttattaatctttatacatagttagctttaacacaacataaataataattctttccctctgccccatagtaaactgtaagatgtttagatgagtgcttttattttttattttttttgtgacagactctcaccttgttagccaggcgggagcgcagtagcgtgatcttggctcactgcaacttctgcctcccaggctcaagcgattctcgtgcctcagcctctggcatagctgggattagcgccaccatgcccagctaatttttatatttttagtagagagagggttttgccatgtttgcaaggctggtctcaaactcttggcctcaactgatctgcccacctctgcctcccaaagtgctgggattacaggggttagccaccgcgtccggccctaaatgaatgcttttaaaaagatgataacacttcagatttgggtatggttggctcacacctgtaatcctaacactttgggaggccaaagtgggaggatttcttgagcccaggaattcaaggtcagcctagacaacaaagtgagaccccccacctctaaaaaataaaaaagatgataacagtttaaagaagcttgtcagcactacagaccaaaggaatgacttgctcatgccacagagaggtattttgtttacagctctgagtctttacagcagctcctgtggcagcatgaccatgtccaggagcatattgtccctgagctgtcactcgcagaacactcagtgaagtgcactaggagcccatggaaagtcaggaaggaatgaaaaggggctttataagcacacctggaacagttagaggggcacagattttgtagaaatcaggacactgattcagcctctggcttgcttctgagtcatggtataatcatgagtaagtgcttggaatcttgcttgctgtttctttatgtcctctgccattaaagaagaggtgacactgattagtcagagtgtaaatgtctctaatgaaacatggtacataattcagatttgtgttgttaccattccattataccattatgctcttaatattactgagcattaacaacattatttttatggttcctcatttagaactactggaaggttgcagactgtttggctgggttttgtatttagaacctatccagaatattggctgatgccaccaagaccttttcctcacccacacaaagatttttgccttgaatcatggaatttgtttaataaatttggtttgcatggttcattatagagacctgggacacaatggagggataattgtattgcagccataccagaaggctttcagaatgtatttcaaatgtatactgcaagtgaagcagtatccaaggaaaaataaggaagttccgtgatccctaattggtacttactcatattttattgaaataagcagaaatgtttggttcagaaagagagagagagaagactcatatcttagaactgtcttgtctcatgtatgttgtgagatctcaatgcacatgcttagtgtagttccttcttgctgccatctctttccccatctcctttcatttgtaaaaattcttcctaaatttttagagtactctttccctgagtttctcaggatcctaaagtcctggttgtaatgtcttccaagtcattgttgccccataacccaggcaagcaagagatatgatgagctcctcctatgtgttgggtctgtgtttccagtacttctcagggttgcaccttagtacagttcacaatttcttctccctctgttctggaaaggtaattttagaaagttttctctcctaggcttggatctgtggaccccttcacctttcactgtatttttcaaattgtatttctttggcacatattattagcctttaaatcctttaacaattagtagagcagaggtccagcctggtctctgtatattcacctactggcagttcctttcacttatagtgatttcactgttttttttttttattttttttgagacggagtctcgctctatcgcctaggctggagtgcagtggcgcgatcttggctcgctgcaagctccgcctcctgggttcacgccattctcctgcctcagcctcccgagtagctgggactacaggcacccgccaccatgcctggctaattttttgtattttttagtagagacggggtttcaccatgttagccaggatagtctcgatctcctgacctcatggtccacccgcctcagcctcccaaagtgctgggattacaggcgtgagccaccgtgcccggcctgatttcactgttttatacataggatattttagacatgaatactatcagtaataattgctaatacatatagcatttactattagttaccattctaagctcttcatatatattaagtcatttaatcctcaaaaccttatgagttgcatattattattatcctcatttttgtggatgaggacattgaagcatagaaaggttagataacttgcctgagatcatacagccagcaagaggtagagtcatccccaagtctgtgttcttaatactgtacaatacttagctgtctttacaatcttgattttttttttttttttttgagacagggtcacgccctgttgcccatgctggagtgcagtggcacaatcatggctcactgcagcctcaacctcctgggctcaaactatcctcccacctcagctacctgagtagctgggactccaggcgtgcaccatcacacctggctaatttttaaaatttttttgtagagacagggtctcactatgttgctcaggctcaaccttgaatgtttgttgctgtttcatttttgtgaggtttcacatttgttatcttctatagcttcaacacattcctgaggaatagatattttcctgttttacattcagggaagcagacaaagaagttaagtaatttgcctaatccaggggtgtcaatcttttggcttccctggcccacactggaagaagaagtgtcctgggccacacataaaatacattaacgatagctgatgagctaaggaataaaaaacaaacaaactcataatgtcttaaaaaagtttacgaatttgtattgcgctgcattcaaagccgtcctgggctgcatgtgactcacgagcgacaggttggataagcttggcctaatgcttcctggttgcttactttagccattagatcacatgatcttccctgcacaaaattgtttgtgtgcatcttggccaaaagcttggggggaaatgacttaaatagtgttgcttctggggaatacctgtgtcacaggtttctacttgtttggtcgcagtagggattttgattggcctccctgcagttaaggcctctgagttggttttcttgccaagcaagcagtaagtgccttctgtcaagaaaacagaaacatgttgttagctattttgaacaatgttagaaatacattgcagtgggaaggagctgcctctgacttctgcccacttcttgaaatattttaaggctagccgtttggaaactttatcattctccagtgtaatcacagggagactgtgcttcccccaaagctgagatttcaggggccttgtagcaatggacaaattacaggtgattttggtttgtttgtttatttttaatgatctctggttctctgtttgctagcttatactgcagcttccagctgctttaagtagactgtgagcaagtgattctcattcttgtagattctgccttctcatttctgttctgcctgctgtgctgttgtcctccctaggttattcatacagttaagatattgtattcagttgctgctgagtgtgctcagagatagcttcaaatatgaatttttatctgggagaattccagttctcctcccatttgctcctatgtgtttcttttcttccttttgttctccagagccagttgtacaagtttaaactactgaagtgatcaaactgtagtaccaattatcagcagtatttattcagaggcttttttttttaaaagaaacagagtctcattctgttgcccaggatggaatgcagtggtacaatctttagctcactgtagccttgaattcctgggctcaaatgatccttccgccttagcctcacaagtagctaggacaacaggcacacgccaccacacttggctaatttataaaaaaaatttttgtagagacagaatctcaatgtgttacccaggctggtctcaaaactcctggcctcaagcgatcctcccacctcagcctcccaaagtctgggattacaggtttttttgttttttggctttttttttttttttgagacgccctctgtagcccaggttggagtgcagtggtgcaatcttagctcaccacagcctctgcctcccaggctatagcaatcctcccacctcagcctcccaagtagctgggactacaggcacataccaccatgtctggctatatttttggtacatttttgtagagacagggtttcactatgttgcccaggctggtctcgaactcctaagctcaacccatctgcccacctcagtttctcaaagtgctgggattacaggtgtgagccaccatgcctggccttttttaaaaattaaatcactcctacacaaatctcaggaaacaacatggcatcttgtatcttacaaaaatcgcagaaatgggcctggcgcagtggctcatgcctgtaatcccagcactttgggaggccgagacgggcagatcacctgaggtcaggagtttgagatcagcctggccaacacggtgaaaccccgtctctactaaaaatacaaaaattagccagacatggtggtgggcacctgtaatcccagctacttgggaggcaggggcaggagaattgcttgagcctgggagacagaggttgcagtgagccaagactgcgctgttgcactccagcctgggcgacaagagcaaaactgtctcaaaaataaaaaataaatcacaaaaatgttttgttaaaattagcagtaattttactggctcttcaagacattttctttcctattaaattcatcttactgagtagataaatgagataaggcttataaagatcttgaaatatggccaggcgcgatggctcacacctgtattcccagcactttgggaggccaaggcggtggatcacttgaggtcaggagttgcagaccaccctggccaatgtggcaaaaccccatctctactaaaaatacaaaaattagctgggtatggtggcgtgcacctgtaatcccagttacttgggaggctgaggcaggagaatggcttgaacctgggaggtggaggttgcagtgagctgagatcatgccactgcactccagcctgggagacagagcgagactccatctcaaaaaaaaagatcctgaaatatggtaagtactcagtgtgttttagctatcattattgtatttgtttccctttctggctttaactgttgacttcctaatccttcctttctcttaagagatagagtccactataaaacttgtatttggttatactgtatgtcagaggcacttcctatccttgtttctacccaccacttctaccacataggcttgtaaagtgcatctccaccagcataacattctaaagcccatcattccacagcaactgtgttataaaacagtgacaggtataggcattctatgatatctggacttttatatgtagcaaccctataaatcaagaaatatttcatttgtagaaagagttctgctacctaaaaaaaaaaaagagtttgaaaactattgccttaaatcttggacctgacagtattgaattatttttagtttgtgggcaggataaggaaaagtaaaccaatgtttaaatatttgaacttgttagaaatgaacaaaaagaatccatggtagttaatttttcttttttaccctaaacttttaaaaatactgcatttcctcccttcttcagattatccagataggacttaggttatttttatctcagacccaagggagaatgacctggataaagtactcctggacatctcccagtgattgaagttacatacatatatataggacatctgctcatagcccagcatgtaagattttggtattgaactttccagtctaagaatatccttcagatgagaacatgtagagagagagagaaaagaaaaagagagtatcttaagggcaggtagcagtgagatgcacagtaatgagtcagtatgtggtatcagaatttatctctattatcagggttattaacagtgcatcagcattgtacattgctcaatttttgtttgctttcatgtaataaaagaaattattgattctaatgagccatcgtattctgttcttttacttgattggtcccactttttttctaccctaacatctacttccagcagaagtgtggcttccagttgttccatggaggcaccttcagggactacttctgggaaaggcagctggagctagaacaggcagaaggggttcagctagagcagatctgacttatctgttccaaataagattttatttgaacatacagtttaaaacttactgtagtagaacatgtaaataatgtgttgacttattgccctcatgggctaaactggaacttggatctcacattctttggatgaggaatgagattgtattactcttcagagttaatcagcattccagaggctttaggctctattttggattgaagcttactaccttgaaataactgattttttttttttttttttttttttttttgagacagagttttactcttgttgcccaggctggagtgcagtggtgtgatctcggctcactgcaacctctgccttctgggttcaagagattctcctgcctcagcctcctgagtagctgggattacaggtgtccgctaccacacccagctaattttttgtattttttagtagagacagggtttcaccatgttggccaggctggtcttgaactccttgacctcaggtgatccacccacctcggcctcccaaagtgctgggattagaggcgtgagccatcgtgcctggctgaaagaactgattctaatacgtagccaaattctttgttacaaaggttggtatgttattagaaattacctaacattgagcctctggagcttctgccctgaaagttgagctatgcagtttcagcaggtacaagatctaccccagacacaagaggcgctatgccaggaccgatgggaaggttttctagttccttagtgcaaaatgcgagggcattactttctttctttctttttttttttttttttttggagtcttgctctgttgcccaggctggagtgcagtggcgtgatctcggcttactgccatctccgcctcccgcgttcaagcaattctctgcctcagcctcctgagtagctgggattacaggcgcctgctaccacatccggctaatttttgtatttttagtagagacagggtttcaccttgttggccaggctggtcttgaattcctgacctcatgatccacctgcctcggcctcccaaagtgctgggattataggcgtgagccactgtgcctggccaagggcattcctttctaaggaatccttagcaaataaactggtcctctacagaagaaagcataaaaaagggacacttggaagaaattcaaaagaaaagaacctgctgagcagtcaaattccagaaggccattactggtgcatctcttgctaatatagtggccaagaggaatgagaaacatgaagttaaaaaggctcaatgaaaacaagctagcagggctgctaaggaagcaaaaaaggctaagctagcatctgaaaagaccgcaatggctgctgctaaggcagcatctacacaaaagatggtgaagcctgtgaaagtgtcagctccccgaggtggttcaaaacaccaagttggcagatcagattcttaaagattggactgtagaaaaatataaattatattacctaacatttgaataacgtattttagtttttcagaggacacgtggcaggttatattgtgctatagagcctcttccacaaatacattcagtaattaaaacaaaaaacaccaaactctcaacttacacaaagcttaattgataacttattaagaaaatttcagattctattgcaatcattcaatctcaaggtgctttcaggatccataagtgagaagaaaggtttaatgtagcatagtgccaagttttgcattactcatattttcttctagcgttgttactatctggcattcatttcttaaccctagaggtcttctggttattaaaaaaaaaaaaaaaacctgtgggagttttttgcttctgaagtttgtttttttgtttgtttgtttgtttgtttgtttgtttttttgagacggagtctcactctgtcgcccaggctggagtgcagtggcgtgatctcggttcactgcaagctctgcctcccgggttcaggccattctgctgcctcagcctcctgagtagctgggactacaggcgcccgccaccatgccaggctaattttttatatttttagtagagatggggtttcaccatgttagccaggatggtcttgagctcctgaccttgtgacccacctgcctcggcctcccaaagtgctgggatcagaggcatgagccactgcgcctggccgcttacgaggttttttaaaatacacatttcattttcaattaaggcagatttagaatatagcataaacacagagaaagtaaacatttagacaatttcagtgtttttcctacttaatactctggaaccagactgcttatttttggatccctgctgtgtacttaacagctgtgtgatcttgggccatttgttttgtatgcatggtgtatagggcatatgcgggagtgataggaaacaagaatggggccgggtgcagtagttcacgcctgtaattccagcacttcgagaggccaaagtgggtggattacttgaggttaggagtttaagaccagcctggccaatatggcgaaaccctgtctctactaaaaatacaaaaattagccaggcatggtggcgcacacctgtaatcccagctacttgggagactgaggcaggagaatcccttgaacccgggaggcagaggttgcagtgagccaagcgcccctgcactccagcctgggcaacagagcgagactccatctcaaaaaaagaaatgagtcgaaaggtaggcgtaatcaagacaataaatagtcttgtgtaacatgcaagagtttgaactgtacgtggatgggaagccactgaagaattataagcaagggaattacaccattacattgtgctttaaaatatttttcaagtaccatttggaagaggtgagttacagtaaggcaagaatggagtcgataagtgagtaatgatgcctctcctacaagatagcatgaagatgacaggagagacaagatgcctgagctagggaataggattagggatgaagggatgaatttgagagatgtaagcgttaagtgcagtgtggctaagactcatcgactatggaggagaaggaggaagaatccagattgagttctgtcttggatagctatctttactctgatgcagttatccaatataggagttttagaggataggaaaggggtagaatataagtttgcaactgaagggcatgtgagtaaattatatgcagtaggaactggagcttaaaatagatatcgagtttgaaattatgcattttgatggtacttggacccatagaagtagaggaatttataggactaaggtgaggggtaaaaaggaattagaacagaatctttggaactctgaagatggaaagagtggctagggaaagaaagaaccagaactattacactgataaaacttttactatttacagcctctttcctccttcttccctgtgtctttaacatgagactaaagccaggaaaggattgggtcccaggaaaccaagcagggcttttacactggttaggatacttgatggaacttttcactacagaatgcaaaactctacactctaaacagttgctgctccccaactgaaaactcctactctgggaaaatgtctacactgtacctttattcacattagtcttgccttgacattgtctgttactcctgtgcagttatgaccacaatcattattcttttttttttttttttttttttgagacggagtcttgcagcaatgccctggctggaatgtagtggtgccatctcggctcactgcaacctctgcttcccaggttcaagcaactgtcctgcctcagcctcccgagtagctgggactacaggcacttgccaccacgcccagccaatatttgtatttttagtaaagacatggtttcaccatattggccaggctgatcttgaactcctgacctcaagtgatccatccatttcagtcttacaaagtgctgggattacaggtgtgagccactgtgcccaaccaacattaattcttttttttttttttttttttttttgagacgagtctcgctctgttgccccaggctggagtgtagtggcatgatctcggctcactgcaacctcacctcctggctttgaacgattctcccacctcagcctcccgagtagctgggattacaggtaactgctatcatgcccagctaatttttgtatttttatagagatggggtttcaccgtgttggccaggctggtcttgaactcctgacctcaggtgatttgcctgtctcagcctcccaaagtgctggaattacaggtgtgaaccaccacgcccagcccaatattcattcttatgagtactctgatgcaatttctagcccatgtattaccaaagatcagatattcactatatatagtaatagttacataacaatgtccaaaaaaggtgtttaatagaaaggagaattttttttaacttttattttaaattcaggggtacatatgcaggtatattgcataggtaaacttgtatcatagggtttgttataccgattattgcatcatccaggtattaagcctggtacccattagttatttttcctgatcctctccctcctcccaccctccaccctctgataggccctagtgtgtgttgttcccctctatgtgtccgtgtgttctcatcatttagctcccgcttataagtgagaacatgtggtatttggttttctgttcctgtgttagtttgctaaggataatggcctctagctccattcatgtcctggcaaaggacatgatcttattcatttttctgactgcagaaagcagaatttataatctgagtaatgccataagatatataaatagcggaaaaataactttacttattgatagacaaattctttatgctggaatatttttatgttttctagactagtgagtgtggagtaattagcaatatgaggttcaaagtttgggtaaaagatttatttttgtcttggttttatttatttatataatatatatatgatatgtatatatagtatatgtatgaatttatttgtagctctgaagatggctgtggtagatatctatcattccaggttaaaggagagacaaagacgaaaaaagtaagtataaaaaaccatcctggcctcctttcagctttggattattgttttgtgtgtgtgtgtgtgtgtgtgtgtgtgtgtgtgtgtctgtgtctgtgtctgtgagagaggcaaggtctcactctgttgcccaggctggagagcagcagcacaataatggctcactgcagcctcaacctctcaggctcaattgattctcccacctcagcctcctgagcatgtgggactacagcagtgcgccaccatgcctggctaattttttgtattttttgtagatacggggttttgctgtgttggccaggctggtctcaaactcctggacttaagtgatcctccctcctcagctcccaaagtgttaggattgcaggcatgagccactgtgcctggcctcagctttgagtgattgaccacatatagtccatgagagaatgctccacttgtgactcatcttttgaccttggagaagactcttaccctccttagacctcaatttttccttctctcaattgaggatagtaattcctgtgttatttttatatcctctgcccttatcctttattgacgttatgatgaacaatgaataatatgggtacactgttttaagctatttgaagtaaaagaacaagataaaataaaggcatcaagacagtattgttacacttttttttttttaatatttgtgaatcattctttgcttttgtctttttttttttgagatggagtctcgttctgtcacccaggatggagtgcagtggcgtgatctcagctcactgcaagttctgcctcctgggttcatgtgattctccagcctcagcctcccaagtggctgggactataggtgtgcaccaccacgcctggctaatttttgcatttttaatagagatggagttttgccatgttgtccaggctggtcttgaactccccaccttaagtgatccatccccctctgcctcccaaagtgctgggattacaggcgtgagccaccgtgttcaacctttttttttttttgttaaataagagacagagtctcacacttactctgtcacccaggctggagtgcagtgtcactatcatggctcactgcagtctccaactcctgggctcaaacaatcctcccacctcagcctcccaagtagttaggactacaggtgcgcaccaccacacttggctaattttaaaacctttttctttttttagactgggcgcggtggctcacacctgtaatcccagcactttgggaggccgaggctggtggatcacctgaggtcaggagttcaagaccagcctgaccaacatggtgaaaccctgtctctactaaaaatacaaaaattagctgggggtggtggtgcatgcctgtagtccaagctactcgggaggctgaggcaggagaattgcttgaacctgggagacggaggttgcagtgagccaagatcacaccactgcactccagcctgggcgacagggtgagactccgtctcaaaaaagaaaaaaaacctttttttttttttttgagacagggtctcacaatgttgcctgggctggtcctgaactcctagactcaaggcatcctactgccttggcctcccagagtgctggaattacaggtgtgagccactgcactcggactgttaggcttttttattttatttttattttttattttattattattacttttgagatggtcttgctccgtcacccaggctggagtgtaatggcgcgatctcagctcactgcagcgtctgcctcctgagttcaagcaattatcgtgcctcagcctcccaagaagctgggactacaggcacgtgccatcatgcccagctaattttttatttttagtagagacacagtttccccatgttggccaggctggtctcaaactccaggcctcaggtgatccgcccacctcagcctcccaaagtgctgggattacaggcatgagccactgcccccagccctattgtgcttttttaatgttctctttctaactgttcattttttaatgagaagtctttcatctaaaaggatttcaaagaaattctgaacaagtttcaggcatactggttcttcctctctttgcaacatatcaaaaagtatacattcagacttagaaattatggatctcagacctctgttggtttcagagaagagtatgcagagggtataagtgtgcatgtgtgtgtatgtatgtgtaggcatgtatttactgtgatgttactaactgtagacacagtgatatctcagcaataaaaaggagagaagccaggtgtggtagcatgaacctctggtcctagctacttgggaggctaaggtgagaggatgacttgagcctaggagttcaaggccagtctgggcaacctaggaaaaccccatctcttaaaaaaaaaagcaaaagaaaaaaaagggacttgagattcactctggaggaactaagatgtgatctaaagcagcagtcctcaacctttttggcatcagggagtggtttcatggaagactgtttttccatggatggctgggggcaggaatggttttgggatgaaactgttccacctcagatcatcaggtattggttagattctcataaggagcacacatcctagatcctccacgtgagcagttcacaatagggatcgcgctcctgtgagaatctaatgctgccgctcctctgacaggaggcagagttcagacggtaaagctgctcacctgctgtgcagcctggttcctaactggtccatggcccaggggttgggaactcctgatctaaagtaaaacttactctctgcatgtctggagttagcttccatgaaatgctgaagaagcatacccagttgctcctatgagaagcttcattgctagttatgaatacctctggtataaatcagattcaagacacataactttgcctggtttaaattctcttttgcttaaaacacaattcgagctagagagtactgtagaactcagttgctgatgttgctatcaaatcttttgttttataatgccctttcattaaacatgcacaatatttatttctagtaccgccagtgttgtgtgaatgcacagttgaaaatgttgaatatgtgatcatggtgccctttagcagatttctctaaaatggctgttctcaattatttccacaagctgaatagattaactttatgacatggacagagattcctttcggtttcatcttaagtgacagacatgtgtttttcagcatttgtgagtggttattgattgattcattcgttcagcaaatagtcatggagagtctactatgcccaacaagaggaaaaacccgtgatgcctgagagtctaaaattgggttagtgattcactgacctgcagaaatttgtgggagtgacttctttggacctctgtattgtattccacctcagcatgtttatgtctgatgatagctatatgtgtaaagcattagtaaatgtgaaaataattctaatgcacaaattattgtggcttttcattctagaattataagagaccatggattaatcaaccttagaaagtttcaatgtaagtattagcagttttctttattttacaatttttttccaatattattgaataattttaaataaatcacgtattgtagttcttaatccaagttgcatattagcctggctatcactccagactaatgaagtaagaatctctggggttggaggcacagcacctgcatttttaaaaagtcttcagggcaattctgatccatagtgagagtttaaagtattaatttggggccaggcgcggtggctcttgcctgtaatcccagcactttgggaggctgaggtgggcagatcacgaggtcaggagatcaagaccatcctggctaacatggtgaaaccccatctctactaaaaatacaaaaaaaaaattagccaggcgtggcggcatgcacctgcaatcccagctactcaggaggctgaggcaggagaatcacttgaacccaggaggtaaaggttgcagtgagccgagatcacgccagtgcactccagcctgggcgatagagcaagacttagtctcaaaaataaataaataaataagcaaataaataaatgtattaatttgtagtcaataaaacttgtattaaaattcttttttaaaaatttgtatagtaattacagtgtgaatattaatgaataattttctggatagagtcatgttttgcaactatgtgttaagcataacataaccttaatcttcaggttgtaaaaatattttagataaataacagaaagtgatctttattttggatggttatagacagacaaaataaatgatatttaatattatatgacggtgataaaaatacatatagtgatttttaaaataaatgccacctttgaccttactgtggttttttgttgttgtttgttttttaagagacaggttcttgcactgttgcccaggatggagtgcagtggtgtgatggtatcttgctgcagccttgaactcctgggtgcaagtgatcctcccacctcagcctccttattacaggctcgagctatcgtgcctggcctttattattttaaatatcagagatacctaagcagggcagaaaaagtccctgtactttttcttcttccacaacatagaggcttccacaactaagaaggatgatgtcataataacaatcacaatgtttgtattaaaatatttgtaatagttgtgtgtcataatattctttttttgtaaagaataacctaatggttaggtttgtacaataacctaatggttattgtaaaacatcccagttgatagattcttgtaggggtatttatttaataatatatagcatcgtagggttcagtcaacaaggttaagtgtctttttagtgtaaataaatatctagccaggcatggtggcttgcacctataatcccagctacttgggaggctgaggcagcggatcacttgagcccaggagttcaaggctgcagtgagctataatcatgtcactgcactccagcctgggcaacagaaaatctatattttttaaaaatatagccatcatcataagtatgttacattttaggtcctttattatttatttattttttgagacagggcctcactccagttgtccaggctggagtgcagtggctcagctcactgcagtctccgcctcccaggctcaggtgattctcccacctcagcctcccaagtagctccatctctactaaaaaataaaaaaaattagccaggtgtggtggcaggcgcctgtagtcccaactactcaggaggctgaggcaggagaatcgcttgaacccgggaggcggaggtcgcagtgagccaagatcgtgctactgctctccagcctgggcgacacagcgagactccgtctcaaaaaaaataaaaaggtaagctaggaaaaaaaaaaatagctgtcataaatgaaagtctgtatcgttagtccaagagtagatagaactaacctaattactgattgaaacgacccaagtagcagttcgagagttactgactgctccaatctaccagttattgttagtcagttttactctccatcttctttgcagatacatctttggattagttgtttggtcagtagtgatccccagagttgctgctctggtgtctctgcatgatatttgcatgacagttgtcaaataaaacttcattagcagtaaattaagttgtagtagttaatttagtttggagaaaggcaaaatgacccatatgaaggatgaaaaaaatacttaccttgcttgaggatgtgtaggtgggacatgcaagaaatcacactttttctcagctaatgggaaatcttctggatggattattttgtctgtagcttctttgttttcctgtgggagttaataccataaattttggccataattcttcctaagaatgtaagatctgcctttaattgtctcgtccattactgccagcagttcctgcccctgtgtagtttaaaagacagtgaggtggccgggcgcggtggctcacacctgtaatcctagcactttgggaggccgaggcgagcagattgcctgagctcagtagttcaagaccagcctggccaacatggtgaaacctcgtctctactaaaatacaaaaaattagtcgagcatggcggtgtgcctgtaatcccagctacttgggaggctgagacaggaaaattgcttgaacctggggaggcagaggttacagtgagctgagatcacaccactgcactccagcctgggccacagagcaagactccatctcaaaaaaaaaaaaaaagacagtgaggtggctgggcgcggtggctcatgcatgtaatcccagcactttgggaggccgaggcgggtggatcacctgaggtcaagagttcaagaccagcctggccaatgtggtgaaattccgtctctactaaaaattcaaaaattagctgggtgtagtggcgggcgcctgtaatcccagctactttgggaggttgaggtaggagaattgcttgaatccaggagatggaggttgcagtgcgccgagatcaccccaacgcactccagcctgggagacagagcgagactccatctcaaaaaaaaaaaagacagtagatgtgggagatgagtagtgctcagtggtggagatgatctccagtgttaacaacatccctgtgggatagttgctatggtgctgtcattatgattagtgttttgcattcttggctttcctgtttgcttcctgtcatggataagttagtcatatgaggttatgaataatgttcttccattttactaattgtaaaaaaaaaaaaatgctgaaaactcagggatccttacatttcccatgacacatttatgttttattttctctgtagtaatggaacggcggtatcccaaggaggtccaggacctgtatgaaacaatgaggcgatttgcaagaattgtggggccagtggaacatgacaaattcattgaaagccatgcatgtaggtggtttttgagccttgagcagtatttgtgtgtgtatatttatataaataggagagataatggtgtgttttatgtgaagttctataaataaataaatggatatttctctctttgttcccctttattaccatgagacaaatttgggactatgggggtggcagaagagaggttaaaaagccctaatgacttcccccattgccccagataaacaataatttagtagtttttctccctactttgtatcatgggaactttcaaatatatatagaagtagagataataatatgatgaactcccgtgtatccatcatccagcttcagcagttttcaacacatggccagtctggtttcatctttaccactcactcttccctcctgccctcaactggattattctgaagcaaatcccagacatcattttattttgttcataaatattttagtattaaaagtagttttaaaaatgaggacagagatggatagcttgtggagatagtacttccatcgatctcttgcctttctgtggtatttctgtgagagctctacatagttaccatttgatttttcactataaaaaattaaaagttgttatgaggccgggcgtggtggctcacacctgtaatcccagcactttgggaggccaaggcaagaggattgcttgagtcgaggagttcgagaccaatctgggcaacatagtaaaactccatctctacaaaaatacaaaagttagccaggcatggtagtgcacacctgtagtctcagctactttggaggctgaggtgggaggattgcttgaacccgggtagccgaggttgcggtgagctgagatcacaccactgcactccagcctgagcgacagagtgagaccctgtttcaaaacaaaatatgttggtatggcagtaaggcctagattgttaaaataatatggactctggcttgttctgtacctttcatcatgacatttgtgtatgtggcttctaagtttagttctgggaaggtagtctactaaggcccttattctcaccgtgaaaatatttcttacatagcattgcagacatttatctgagccaggttggttgtcctcaccaaacaccttgtttggttagcattctttgtgtggtttgtaccaggtgactgatcctttacttcctgtcccagtttgggacacacccctggtttatgtgtcattccaaaacactacaccccatggattgtccaggctcttccttcattctctgtttcaaaagcagccaaattagaatgatttgtagaacttttaatagaagatagttagagcagggaaacttggttgttaaaaaaattatattttgcccagtgcggtggctcattcctataatgccagctactttggaaggccgaggcgggtggatcacctgaggtcaggaattcgagaccaacctggccatcatggcagaaccccatctctactaaaaatacaaaaattagccgggtgtggtggtagatgcctgtaatcccagctactcaggacgctgaggcagggggaattgcttgaacccgggaggtggaggttgcagtgagccgagatcatgccattgcagcctgggcgacagagcgagactctgtctcaaaaaaagaaaaaaaaaattgttacttttgtagacaaatgaatttaaccatttcactaagttttctagaagacagttccagctgctgcatctggagacagcagctggaagatagctggagtaggttttcctcagctcttgggtaaaatttctaatgagaagttaccaacgagtaggattctccaaatgaacttccctagtcttataaggcagaattaatgaaaatgctcaatagcaaaagtgctcactaatgttgcttttgtttttgtaattttttccttcattccttttggggaaaacagtggaatttgaactccgaagggaaatcaagaggctccaagaatacaggacagcaggcattaccaatttttgtagtaagtatgcttcagctacataccgtacttgagggcaagtatcttccagacacacagaggaagtctctgaattgttgtgaatttttttttaaaaaacaagctttcctttaccagaatgctttaaacctttccagtaaagttttggctatttaatccctataaatacctttgtatagattatctttggtactacaaaagttgtgagacaaaggaaagagaggtgctgctttagatttaggattctgccgaggctctttaaaaaaagggaatcttgggccgggtgcagtggctcacacctgtaatcccagcactttgggaggccaaggcaggtgggtcacttcagtccaggagttcgagaccagcctgaccaacatggtgaaaccctacctctactaaaaataaaaaaactagccaggcgttgtggtgcacacgtttaatcccaactactcgggaggctgaggcacaagaatcgcttgaacctgagaagcagttgttgtagtgagccaagatggtgccactgtactccagcctgggtggcagagggagattctgtttcaaaaaaaaaaaaaaggaattttatattttaggtgtgtcacccttttcaaatttaatgatacatggtcttagcatttttataaaataatgaagcttcaactggctccaggtgcttgcatcccagttacttggggtagtgacaataattatattattagcagctaacatctatcagatatttaccatgtaccagtctctatgctaaccatttcacttggatcaagtcaatgaattctcatgacaaacttataaagtaccgttacttccatttagtgaagaaattaaggtataaagaggttacagagctagttagtactagaaccaggtcataagagatagtgtattatagtagttaagagcttgggtctagacttaaaaagcttgagtataaattttggctctccagcttgccagctctgtgatgtgattctatccaaatttatttttctttccttttttttttttccctagagactgactcttgctatgttgcccaggctggtctcaaactcctggcctcaagcagtcctcccgcctaggcctctcagagtgctgggattacaggtgtgagcaactgtgcctggcctctattcaagttttaattttctaaggttcttagagttagtgtaaagatttaattagagatactgcatataagcatagcacagtatctggcacacaataattcctcaataaatggcagtttctgttgttttgctgtcattgttgaaatgatctttagcattccctccttcttcctatttgaagtttttgtgattattgatagttgtcacctactatctataagaaatagttggcttcttttttttttttatttgagacggagtctggctctgttgcgcaggctggagttcagtggtgccatcttggttcaccacaacctctgccttctaggttcaagcgagtctcctgcctcagcctcctgagtagctgggactacagtcatgcaccaccatacccggctaatttttttttttgtatttttagtagagatggggtttatccatgttggtcaggctgatctcgaactcctgacctcaggtgatccacccacctcagcctcccaaagcgctgggattacaggtgtgagccaccacgcccggcaatagttggcttcttaacacagccctgtgggtgcaacatagccttatggatgtaagttcagcctagtataatggctctttaacagtggaaaccatttttgaaattaaattttgtgtgagccccaatctacaaataagataaaagtgggctgggcacggtggctcacacctgtaatcccagcactttgggaggccgaggcgggcggatcacttgaggtccagagttcaagaccagcctgaccaacatggagaaaccccgtgtctactaaaaatacaaaattagctgggcatggtggcgcatgcctgtaatcccagctactccggaggctgaggcaggagaatggcttgaacctgggaggtggaggttgctgtgagccgagatcgcgccattgcactcaagcctgggcaacaagagcgaaactccgtctcaaaaaaagataaaagtggaattactttggttgaactttaatggttcaatttatgtgtagagcccaggacccgccggtatctggcagtgccctttctctttacattaacctctaagatactcttgtggtatcctggggctctgtggaacctagtttgaattttgaaacccactggtgcagtattttggaatctgtgaacctttgttaacatgtagaaaacaccacgcagctcttctgtttagcaagatgcatatagagactctgataactaattttggtttcctgatattggctgcctctaagaaatatggagaagaggtactacatgtcaaagagaactctttttttgtaattctaattgttttttaaggaaaggcatatgcttatagcacttgtgtgactttgaaaaaatttataaaaatagaaaaaacaggaagcaaatatgactatagtaaaagttggttactttttgagagtggaaatatgagcaattcttactttctttgtacttttctgttggtttttttccccttatttcttacagatagaaaaggaatacaaatgtttaatatttaatacttagtattaagaaaaggatttcagactagggaaaatctacttgggtcttggagaaataattgtgaaagcagttttgcaaaggaaacagactttaagaacaaaacccaaaaccggtttcttggtcagttaggaagcccttcagttctgctgcattgtcattgtggtcattgtgttttctatacccccaggtgccagaacctacgatcacctcaagaagacacgggaggaagagcgccttaaacgcactatgctctcagaagttctccagtatatccaggacagtagtgcttgccagcagtggctccgccggcaagctgacatgtgagtaattactccagggtgaaggaggcattctttctgggatgccttggccttcacatatatttttgggcaccctagatggcagagtaataataattgagtagctggaagaattcagaaatattttagcagtccatctcagaaacagtgccatactgacagttttgagaaataactgacctcctagaatcatactttactactttgatcctattttttaaaatgagtgtattttcccccagccttctacccatgacttcaactctctcttcatacctagattttcactggggaatcatgtttgtatcccttccccttgagtggtgttagtggtgttctagattacaagctcttcttaacaaatctgaggaatttttcttcctcagaacagattttctttcctgctcaatacagtgagatatctgtaaaacatagttcagtctatctcattacacttcttcaaggtgacctacctgataaatggcacccagtctcaccggggcttttggaaatcaccttgtttgatatgacctaagtttaaattcctcttcttcgttgtagtgattccggcctgagtccttccattccaatggcttcgaattcaggtaattatttctcaggccagaacaagtcttaattgtgaagtttgcatcgtaggggttatagtgacccagcaatcttccttcctctgtggtgtcagggtgcttaggcagagtaacagtaatcaagtgttagcccaatatataaacatcagtatgttttcagaaccttcatggccagacagagactatcctcagagtgacagtatagagtatagacagtatagagacaggggaaaaaagaacttcagagaggtaacttctttattttaccaatgttcatgagcagttagtttactgcagttgtgtctaccactaattttgagacttatttcacaggagataaattaaaagctttttattttattattttttatttatttacttattttttgagacagagtctcggtctgtcgcccaggctggagtgcagtggtgtgatctcggctcactgcaacctccgcttcccgggttcaagtgattcttctgccccagcctcccgaacagctgggattacaggcatgcaccaccacgcctggctaatttttgtatttttggtagggacggttttgccatgttggccaggctggtctcgaactcctgacctcaagtgaggcacccaccacggcctcccaaagtgctggaattacaggcgtgagccaccgtgcccagcctaaactttttatttttatataacatgagcaaagaagcatgttacttgccagaaacataaggatttctgagttagagacctaaagtatttctatttcttcgttttacctctttgagtatgtcctattttgaaattagtatacagagcaagattaagccatacgctatctgatgatccttggtgattggtaatcgatgactgggaattgggggaggtatgtctcagtagattcagaatctgggtctcagatttgtccgcgttagggacttttttttttttgagatggagtctcgctctgtcacccaggctggagtgcagtgacgcgatcttggctcactgcaacctctgccttccggattcaagcgattctcctgcctcagcctcccaagtagctgggattagaggcgcctgccactatgcccagctgatttttgtactttcagtagagatggggtttcgccatgctggccaggctggtctcgaactgctgacctcaggtgatctgcctgcctcggcctcccaaagtgctgggattacaggcatgagccactgcgcctggtcactgaagggacttttttttttcccccatttattcctttatttcaagtgattttttcttaatatggaaagaagaaaaaggtattgttttaggggagtggctaagacagtgaaatcaaagttttattttgtaagtttcttactgccaacactctacccccaaaatctaaatacaactaagttaatactggctaattaaaatgaaggaactgggtcaggtgcagtggctcatgcctgtaatcccagcactttgagaggctgaggcgggcagatcacctgaggttgggagtttgagaccagcctgaccaacgtgatgaaaacccatctctcctgaaaaaaaaatataaaaattagctgggtgtggtggtacacatctgtaatcccagctactccagaggctgaggcaggagaatcgcttgaatccgggaggcagaggtttcagtgagccaagatcgcaccattgcactccagcctgggtgacagagttaagaccatctcaaaaaataaataaattaattaattaaattaaatgaaggaactggctaacatgatcatatatttttgttctctgtactatctgcactgacttgttcattgtttcttttttctttttttgtgagacagggtctccctctactatccaggctggagtgcagtatgtgatcatggctcactgtagcctcaaactcccaggcctaagtgatcctcccagttcagctcctgagtggctgggactacaggtgaatgccaccaaacctggagaaatttttttttttttttttttttttttggtagaaacaaggtcttactatatcacccaggttggtcttgaactcctgggctcaagtgatcctcctgcttcagcctcccaaagtgctcagattacaggtgtgagcctctgcacccggcctcttgttcattgtttgttcctagcctgtgttagcctttctcaccccttatatttaggctgaggagatctcttgctctcctttatgttctgagttcttaaggcaactatgtattggaagcctggcatctttgattgtagcctagcctctggtgacttttgtgaggaaccaaatggttttatctccctttttgaggatttggaataatcccttatgccttttgttgatgtaacagagaagcctgttttccaccagtggagcttgtaacagtccctcccctttctctgccccacttgaaaagcaacctctataaaacttcgacattttctttgcttaactcagtctatccattcccagctgaataccaatccctaatacacattcaaaacaaaaccaaaaaagttttgctcatcaagcttcccctcctggccagtgacctcctacttgggtttctttctcaggtgtgtgagttgacctcagcccctgctttgccatataatggctcattgttcctgtttgtggatcttgcaggtaaacagggctactttggaaggaacagatattccctcacataataaaaaagaagggccttttgctggcctaacagtctttctttgatctgaaggcacacagtacttggttaattaccatgtttgccttgtactgctggccgagtggcaaggattagggaatgtctgttctgcagttattatttccattcgtcagctgtcaaagcaggcattgtgtgatgtttcttaactggatgacatctgggcatcagattttagagtctcctacatggttaggaagaaataggtgatagtcgggcatggtggcatatgcctgtcttcccaggtagttgggaggctgaggcaggaggatcacttgagccagggagattgaggctatagtgagctatgatcgcaacactgcactccagcctgagcaacagagtgagaccctgtctcaaaaataataataataaataagagataactactgtggtgagtagttacatttgatgctaaggtatgtgtgactgtatgtgtattttagcagattatgggtaattcatgtgccctgaatatgtaattcattttcaagtgaatgttcgggtgcccatgttgttagctaaacaggcctgagggaatgggacaggatttcctaagctggatatagtgatcctatacctaactggcctggctgcactgaactttttaatactttacacctgagaaattgtcactcctattaaatctatgctgtttcctttctctgtctataggtagacggagtgcaccacccttgaacctcactggcctccctggcacagagaagctgaatgaaaaagaaaaggaggtaacaaaagggagggggctgggagaaagagaataggggctgattattcattgagttgtcattaaaaatccattacagggtcaaaccccttttgtttcattcatctaacatatatgcacagctctggtgaatcctagaagtccaagagctaaagagccgtttgtggcagatttcagagaattgcttaccttgtcaccctaccaccattcctcttttggggaaagcacatgtggtatgtagatgacataataatagcaactatcatctattgagcacttaccatgtgctactctactgagtgctttatgtaaataaaattaattttttgtaaacctaaagtaacttctacatgaaaatagatatttcctattagaatggctgccttgaaaagttctatacttattccaacaacataatcattatttaaaacatttttgtaaattgtctccagagcatgtttataaacctaaggaaaagatttctacatcatatatagtcatgttaattttgattttaaaaattattttttatttttatttttttttatttatttattttttgagacggagacttgccctgtcacccaggctggagtgcagtgatgcgatcacagctcactgcagcctccacctcccaggttcaagcgattcttctgcctcagctccccgagtagctgggactggactataggcgcttgccaccatgcctggctaatttttgtagtttttagtagagatggggtttcaccatgttggccaggctgatcttgaactcctgacctcatgatccatccaccttggcctcccaaagtgttgggattacaggcgtgagccacctcacccggcctattttttattttttatttgaaagtctcgctctgttacccaggctggagtgcagtggtgtgatctcggctcactgcaacctctgcctcccgggttcaaacgattctcctgcccctgagtagctgggactacaggcgcataccaccacacccggctaatttttgtatttttagtagagacggggtttcaccttgttagccaggctggtctcgaactcctgacttcaggtgatccactcacaccagctccaaaagtgctgggattagagatgtgagccactgcaccggcctgattaaaaaattatgtgacctactttttccagttgcaatcatcagacatgtcttcatattgattttatctgtttctaaaatttaaagccagcctcataagagtcatcatcaggagttttcagaaaactttgtcacatctctgaagtctgttcctcttttggaggagttcctcttttgctcctcatatgctccttttataattcccaaggtcagttccccatctcccaccatatatcattagttcagttcagataataaggaagggtcatagtgtaggggatagtgttagtcttattttatccaccaggaacagtaaggattagtttgggagtggaaggaaatgtatgtagtatctatgtattgctgaaggaggtcataggtcagcctgattcaaatattgaatggcctggaatttcaagctttttttatccttacccacataatggtgacctcagactcctcattgctggataatgtggcaattttctagatttttagcagttaaagttacctcctcttagcaaggtctctttatctcctttccctttgaagtaggaaatgtaatccccaaagcagggactactgctttatgctgacactaaaaacaatgtgatgcagccttgagaatccaagtgtctgtgcattctgcccccactgtgccccatggctcttccctgaccattggtgctgggactgtacctgggcatttagtgtttgactcctgaaagagccaggctgctcctcaggagcacatagttgtaaatccctaacaaacccaggcccctgagccagctggcatgtgctaaaggctcttctagtatcacaccctggctttctcttcctgggtgtgtgtccttagggagtgttctctccagagaggaagagactaaatggaatgtagtccagccacccatcagctcctataaatagttggaggttgatgtcactttaaaaaattttttgctatacctgctggattaaattacaaaaatgacagatgttaatgtttattaaatttgccgtgtcttgcagctctgtcagatggtgaggttggtccctggagcctatttagaatacaaatctgctctattgaacgaatgtaacaagcaaggaggcttaagactggcgcaggcaagagcactcatcaagatagatgtgaacaaaacccggaaaatctatgatttcctcatcagagaaggatacatcactaaaggctaaggctccaagagcttgggatcagaagtcagaagtttggaatgtggtgggtcaaaggacaatatgggtgggcattctggagagttgtttttcagctgaattctcatggtgaaaacaggggaaaggacaaaggaaaccttaagttgtattgtctactttcttctccatcctgctttaaaacactcctgttgttggtattatgctgcagagttgtgtgctacataagctattattaaatgtgagtgggcattcattcctaacacctcttgtaactaaaagaaccatagtacctcacatcacagtgctggtagaaatggaactaaaccacagtctgtaatcccaggagtccagctcagatccttatattgcgaggtaagtttgctgattatctgtcttgccttcaaacactgcagacagatttaaaataaagagaaaggttttagagcataagaaagctctcgttgaaggattttttaagctgacaactttttttttttttttttgagacagagtttgctcttgtcctccaggctggagtgtgatggcaagatctcagctcactacaacctctgcctcccaggttcaagtgattctcctgcctcagcctcccgaatagctgggactacaggtgtccaccaccacacctggctaattttgtatttttagtagagacagggttttgtcatgttggccaggctggtcacaaactcctgacctcaggtgatctgcccgcctcagcctcccaaagtactaggattacaggcgtgagccatcgcgcccggcctaagctgacaacttttatgagtaaaggggaagaaaatatccttatgatggtcttatcccaaactgcatctttaacttcggccgggcaaggtggctcacctgtaatcccagcactttgggaggctaaggtgggcggatcacgaagtcaggagttcaagaccagcctgaccaacatggtgaaacagtctctactaaaaatacaaaaattagctgagtgtggtggcacacgcctgtaatcccagctactcaggaggctgaggcaggagaattgcttgaacacaggaggcagaggttgcagcgagctgagatcacgccactgtgctccagcctgggcaacaaagtgagactctgtctcaaaaaaaaaaaaacaaaaaaaaacctttaatgtctggctttgtactttgcagtctgcctgtctaatctgcagtagtcttttgaggaggtggcaccggatataacatgtctctgttatttttagaattaattaaaatgttttgctatttaatttgtgggtgtgtcaaatattctggtaactgaaacacacttaaggtgttggatgcctgccccatcacgctgcactgtctgctgtcacatgtgtcctgaactcaccctgtttttgccctgggtttcccaggataccaagcccctgaggatggagatgatgcaacaaacctcagctttgcttggattgtgacttgaaccctatttctcaatggtgaaaggctagcctgcaataaaagctgcttttaaaacagaagtaaagcagctttatatatgggactcactagatatgagggtaagtagccccaccacatgtaaaacttggtcctcaaacgtttctgcagaataagaagccaaacttatggttatcttgtttctgttagaaacaaagttgtatatagaaataacttcgtcagaatcgacacaaatcacatcgaatagttgactgtttaattccttctacattcaaatatctaattaaaatactgtgtgctttgttggaagcatctgctcaaacttttgactgttgtaaatatgcatgcagctgggaagggattcatctaagggataagaaatgaaaaagacactctaaggacctgagggaattcaaatagaggacttcgattttttaaaaagaatgacgtggaaatgacctgttttccttgtaaaatcatatctcgtagaaaacattttaccactaccatcacccctagttggttgtgaagtgattgcctcttatccctgaaaggaaactcctgttctgaaaagttgggatgcattagccatcagtgttaggtgacgtctgttgtagtctgaagagtccttaaccttgattaaggaaggcttcctgggagaggtgggcttttggggcaattatatgatagagaagagagagaaaaatggcagatggaagtgggagacaattccacacacagggggtggagaatgatgtggaggcagcagtgggtgtaaggacaatggtgccaagagatttatttggctagaacacaaggggcagctgggtagttaggagtgggaggatggtaggacagtctgacagaaaccttggaaacagttgaactctgaaaagctgatggcaaatcagatttcatgaggaaaatggcatggttgaaaatagtaatagaaaaataagactgaagttttaaatgactggatttttgaaagtaggattattatttctttggtataccgaactttgcaaagatacgtagcattgcatccttcctctttgcttctagacagggttggccataaaccaactacactgatagaggtctctccagattgtctcagaagagagagtttaccctgaaacttaatgacatgaataaaacctgtttactgaaatttttattgcaatttaacgttaaaagtttctgctggagttttatgcatatttttctctctaagtggtgggaaataaagaacaaatctctttccatgtaatgactcttctctgtgctcaaagaccaagactctgtctcttgcgataccaattaatactaaatattcagtttatcttttcctgggtcccagtttctttccttttattgttaaccgtcttcacttcccccgcttttaaaaatctgaactcagttaagcaaccagtcattgaaatgactgggggttagctggaaaagggagaaaaccaatggcattcatcaataacaacaaaatcccagtttgtaggacattctagctttaggaaatatgtaggtatgtaacaagagaaaaaatctgcattgaagaatcagaggccacattacacagcagtttgggaaaactcactcataaatatgtatgagttttattatttctttggtaaacccagctttgcaaagctttatgcctagaatccctccaaaaaacactttttcacccatctttaagcaaacagtggtactgtattctcaacagcattctggggaacttcgcccattcatttttaaggatatctttgtggacaccttctaaatgtacattgcattattcttgacaacacaaaagggttttctgtatcttatatgcacctagctttttgtttgaatttctaaaaattatattgaaataaaagtttgattcaagaggtgctgctgatctggaagctttgctttcctttccaacgtgcttagccaaatgcagctaacctttcccacatctgccagaagggaccatctttggaacacgaggacactgccatgtctgtggccttgcatagaagagttggccaagctaaaagaattctttttaatcagacactggctgggtgcagtggctcatgcctgtaatcctagcactttttgtggctgaagtgggagagtcacttgaagccaggagtttgagaccaggctggacaacacagcaagacccccatctctacattaaaaaaaaaagaatgctgggtgtggtggctcacgctttttctcctagctacttggaaggctaaggcaggaggattgcttgggcctgggtagtcaaggctgcagtaagccatgatttgtgccattgtaatgtagcctgagtgacagggcaagaccctgtctctaccaaaaaaaaaaaaaaagacgatacctagtccttttgagccaaatgtaagtgaaacagagcaagagcagggtcacagcagcctgaatagtaatagtcctgctgacataggcacttgatttgggagtgagaacaatagtgaagagtttttaggccagtggctcatgcctgtaatcccagcattttggaaggatgaggtgggcggatcacttgaaatcagaagctcaagaccagcctggccaacatagcgaatccccgtctctactaaacatataaaaattacccaggcgtgctggttcacgcctataatcccagcctcagggaggctgagacagtagaatcactggaacccaggaggtggaggttgcagtgacccgagattgcgccactgcactccagcctgggcaacagaacaagactgtcaaaaaaaaaaaaaagtgaggagcttttaacttgggaatttggaacctaagtagccagtccttgaagtgtgcatcagaactgacgtgttagtgtgctgtgtttgaggagggaaaaatgaacagttgctgagaggtatggaaaaccagtttctttgtctaatggcagggagttctttttctgttgtttgttgccttggcttccagcagttaaggtgtactgcaatcaaactgccctttgatttgattgactaagctacaaatcagagacattatttaagggaaaggtgaatgtcgtgcatctgccatcacaattcctttgtcacttgagtagcttgttatgcattgtgtcctaggcccccttccctgttgacagtaggaataaggaaatggagatagcacaggaagttaaccactaaaaggttccaacccctgaaaactacaaaaaatttatttcatagatgtagccctgaaggtcactgtacttacccttgtcttggaaaaccctgtagttaacttttgccagcccagacttggtctggataattgagtctgatgcacctattttctacgttagagcaccagaatggatttttgtggcaccaaactaatcatttggttgaattaaccccctcttcttaaccaagcaacacttttttcatcttggtctggtctcccctgaggctgtgggtggcaaaaagcttccaggtagcttataataatcctgccttggtccagagttgtgttgaacagaatcagcatcttaggaaatgtggaaaggagaaggtctcacagttgttttaagaaaccagcactttcttaagcagaaatgctgaaatgctgccatcaaatcacccttattcagtgaactgacagccaagtgccaactcatgacacttctaacatatctctcctcttgttggaaagctagctgccgagtatactctccatttctgaaattgttcgcaatgacgtaagactttcttcctattgaacaatatataactattgatttggatccttccctcgcccctcacctttcattatcatcatttagggaattcctttaaaacagaaaaacatattaagaagttaaaaatcaacggagggcaggcgtggtgactcacacctgtaatcccagcactttgagaggctgaggtgggcagatcacttgaggtcaggagttcgagaccaaccttgccaacatgttgaaaccccgtctctactaaaaatacagaaattaggcgggcgtggtggtgcatgcctgtaatcccagctacttgggaggctgaggcggctgaggcaggagaatcgcttgaacccaggaggtagaggttgcagtgagccaagatggtgccactgcactacagcctgggcgacagagtaagactctgtctttaaaaaaaaaaaaaaaaaggaatttgggctgtgggctcttaatcatttctgataacagttactaccagagataactagctcctggaccgagggagagaatagtgcatttgcccaattgatgtccccctataagaaaactgatgtttttatttcagtttctaatcttatttcagtttctaatctttaggaagttgtccaatttttggggtaatttaatagcttttcccaaaaattattgaaaaaagagcaaaaagttcagaaatgccttgaagactctagctgagatggatggactgattcgaacttttagtagcagacgagacagcaggattccgaccctgagatcaggttatttgctttggagaggtggggtaacagcttttccacacaatatccctagtaggaacctctttttagcctttttaagggcaaacggcagctgataaagccactcccgtggaggcagaaacatttaagctctagccacagacaggtgataggaatgtcaacctcacctggctgtcaaccccaacaagaaaatcttggccttgttctgggcgtgcatagcttcagattcaggacacttgtcagatctaagatgggcataggttttaatttcatttaatttcaacttccaatgatacaaatggaagatgcaaagtgaaatgcttttgagagcaaagtctcccaggggtgcctccacccacccccagcgactgtgcaaaagaaggcgtttgtgggagagaagggtgactatagacgtcattgcatcatccagatcccagctgtgacctggctcagagttttccagttaaaaataaccatggcttacaattgggggaaaagagtaaactgttccgtctccatggaaactaggagtgtgtgttgaggggtggggggaagacaagctacagatttctagcacatgtggcaagatggggtggatgtagggaccagaagcttagaggccctctgatgaaagttgatacccctatttagcatccaggatgtggccagacactgctccagggctctggagacactgcatcaaggatttgtttacaacgatgtgtacatcttgggtctggtgatgaattaatttgagtcttctgacttcctgtaacagatttgctactatttggcaaagcaaagagcagatgagcaagactgtaggttagatgttgccttttaatcaatctgggaacctccactacctttccattcacattctgtttcttagcatattcagcacaccttcatttgcatattcagtagtttggttatgacacatgtagtagtttataactagaggagaagtctccaggttttttgggctggtttggaaatttactccccttcagtaagaccaggttttcttctttgttccatgagtttacgcaaagcatcattcattagcttgtttgtctttaaaggtaggtctcttaccatttctggtatacttactaccagagataactgactcctgagggaagaatagttcgtttaccctttttaaaaaggtctctttaaaattttcttttcttcaaatacattccagttgtaaacaaaatcgttttaaacactcattttatttttattttttttgagacggagtcttgctccctcgcccaggctggagtgcagtggcacaatctcggctcactgtaacctatgcctcccagattcaagcaattctcctgtctcagccttctgagtagctgggactacaggcgtctgccaccacgcccagctaatttttatatttttagtagagatggggtttcaccttgttggtcaggctggtctcgaactcctgacctcaggtgatccacccgcctcggcctcccaaagtgctgggattacaggcgttgagccaccgcgaccagccatttatttattttttgagatgcagtctcactgtgtcacccaggctggagttggagtggtgtgatctcggttcactgaaacctctgcctccctggttcaagcaattctcctgcctcaacttcccgagtagctgggattacaggtgcacaccaccacacgcagctaatttttgttatctttagtagagacaggatttcaccacgttgggtcaggctggtcgccatctcctgacctcaagtgatccacctgcttcagcctcccagagtgctaggattacaggcgcgagccacctcgccccaccaaaacacccattttaaaattaagatttacagagcaggctgggcacagtggctcatgcctgtaatcccggctactagggaggctgaggcaggagaatcgcttgaacccgggagttggaggttgcagtgagccgagatcgcgccattgcactccggcttgggcgacaagagtgaaaactccgtctcaaaaaaaaaaaaaaaaaaaaattatagagcaaataactgaggaagaagtagggattgttgacattactggctctctacagctaaatgctttcttgtttacctgcctggtgtactgaaaagatctgagcactaatccctgttctggtatttaataataatgcaaccttgggcagtttcttaatacttatgtctaaagtgtggttggtaatacctacctgactgggttgatgaagattaaatgagccgggtgtggtggcttacgcctgtaatcccagcactttgggagtccaaggcgggtgaatcgcctgagctcaggagtttgtttgtttttttgtttttttgttattgagacggagtcttgctctgtcgcccaggctggagtgcagtggcgcgatgtctgctcactgcaagctccgcctcccgggttaacgccattctcctacctcagcctcctgaatagctgggactacaggcgcccgccaccacgcccggctttttttttttttttttttgtatttttagtagagacggggtttcatgttagccaggatggtctcaatatcctgacctcgtgatccgcccgcctcggcctcccaaagtgctgggattacaggcgtaagccaccgcgcccggcctgagctcaggagtttgagaccaccctgggcaacatggtgaaaccctgtctctactaaaatacaaaaaattagctgggcttggtggcgcacgcctgtggtcctagctactcgcaccacagcactccaacttgggctacagagtgagactctgtctcaaaaaaacaaaacaaaaacaacaaaagattaaatgtgttaaggtatataacacacctggtgcctcccttccttttcttttcccactgagcctttgacatttagtttcactgcggtcaggtatgagcaagtacatgattttcctgtaccacccaattcacatcatgcaaaagtctcacagagagggacatgaagatctgcaagaacaaatgttaaaacagacagatgtgcattttacaaggatgttgtttatcttgaaattctcatcactgcatcattgctactgcccaagggttgaattaagggcaaaacatttcagagacagatttgaaattacctaattatcctagacatgttgtaatgttcccttttataatgcctggctcaaaaagcttgatgtcaggttacagaactgtatgcattctttgattgtaattgtgttaacaatagtaaaaaatcttgcatacaatcaagaccagaaagaaatccagatgctaattgttgttttgttaagtaataaaatggtggtaagcaatgctttttctctttttgcttttttttctttttcttatctgtaatgtgacaattctttattacttggaaagtacattttatgagaactgtgaaaactcggaaagtagaagttcaaagtattttacatttaataacatctagctaatccttatgatatctagataaggtgctactttacatcttatgaaatagcacaagccttaggcaaacttctgtagtagaagaaatgtgttctgagacttctgagacttctatcttgctagtttttaagatatcttttctcccagaaacctggtgtccagtgtccctctcaaatctgccaaaggacagtagcttaaagatttacttatctcaggggagttgcatttttatagccatcaatggcatataatttggaattagaggcacaggcaagcaggccttccgaatctctgtgagccacaagacccgatggcaccctgaaatcaaacttctgtagactgggagccttgttgaccgctgttccccaattctgacagatcaaagctgttgctaatttgttaaccagaggcagtgatacaaatggaagatgcaactattcattctgagggacgcataaaagtctgattaatctaaggagcagtcattgcccaagcagttaaggagaatatttttggaaaggcagacatcagaagctaagcagagtacaaatttccaccctctacttactgtattaatcatatcagctctcactcttcgtagatgctgccctgctcgaaagcactggttatttagctgggagtcaggagaacccaaaccctccctgggcatagacaaattgtaattttatagcagacagcctctaaaatgtttctacatccacaacagttgacactgccaggcgcagtggctcatgcctctaatcccagcactatgggaggctgaggtgggaggattgtttgagcttaggagttcgagaccaggctgggcaacatattatttaaagagactaggtctctttagtaataacaaggccaggtgcggtggctcacgtctataacctcagggggcatcacctgaggtcgggagttcaagaccagcctgaccaacgtagagaaaccctgtctctactaaaaacacaaaattagccaggcgtggtggtgcgtgcctgtaatcccagctactcgggaggctgaggcaggagaatcacttgaacccgggaggcggaggttgcgctgggccgagatcgtgccattgcactccagcccaggcaacaagagcgaaactccgtcccccccaaaataataaaaactaattagccaggcgtggtggcgtgcctgtagtcccagctacttgggaagctgaagtgggaggaccacctgagcccgggaagtggaggcttcagtgagccatgattgcaccactgcactccatcctgaagcctatcttaaaaaaaaaagaagaaaaagtgacacctataaaaaaactcacatacttatagtccagaaatgtgctgtccagtaaggtagccactagccacatgtggctatctaaatttactaaaataaaattttaaattcacttccttagttacactagccatatttcgtgttcagtagcaacatgaggctagtggctactgtactggagagtggagatacagaacatgtccatcatcacacaaagttctactggacagtgctggtccagaagagaataacttcaaattgcatttttggtacaggcatgtataagcccgcacttccacattctgtaaaggcataaaccgcctccctaccccagggcatgtctgtacagtcattaaatggtctgactccagcacttctttctacttaatctctaaatctctaaatcttgacacgcacatcgcacacaacacaaactctattttagcccacctccctcttcactgactcttcatggtaggtttagttcccataatccatgaaaatgcctagctccttgtcactagagcttgttttggaaacctgcctacagtgtaacaagctggaatgtgaagagggatgcatctatttgtgttgctgagtcattgaattgactgaagcttcaaggactagggggtgctgagcagaaatgaaaacacacaatcctttctgttagagatttgctcttttcgtattggcatgtaaacaagtaagtcactaagtgaactgacgtcacaatttagttttaggaagatgcttttcccaggcacgatttgaactcagtggtttcctgaatctagcaaagtatgctgctttgttttctcttagattaattttgcctaattttaaagctttgattctctttttacgaagacgaaaataaatctctctagtctgggcctttttcgtttcccaggattatgattaaaattatcactaacttttagatagtccagcacgcaccggatgactctgaagccggttgggcagtggagatcgggaagaacatgaaaaagcttcaaagcttttggttgaggacatcgggagatgtaaaccccaaacgcgggttttacttctcccctccacccctccccgcaaacccatgcctactcgttttgactgctcagcaattctgaggccaaccatttgcaacggcgaggagcaggggctggtgagtcaaggactgggcatggagtcaggactcttaggtgccttgactcacggcagagccttgaggaagtcgctttgcctcccacgtgtctcccttcacctgccagaggcggaggggaggcggggctgtgctggaaaacgtccgtttcgcaccgacttatgttacagatgggcagacctgaattttaaaagaccctcagagtcacacagcaaatgagccctcaaatgcccgtgtcccgcctgcgctccggagaacccctgccctgcctcggggactcgggaggtgggtgtgggctccgagactcggacggcaccttggcgtggcgagagcaggtggagatgcgcacggaggttgcatgttcacctccgggtctcgggcgccacggctgcccgtacctgttccagcaagcgtcagccaggaactgccgcgctactgattttcccttcgctcttgggtcccaacccccgggctctccgggctagggaggcggtggggtggggtcgaggccgtcccgagccacccgcggcggcttcacacctgtatcggatttgctttctcgcctttaatcctctccaatcccgaaagcaccccagcagagcgcccccgcagcccgcctcgagcccggctcatacgcagacgctgactggggaagcgaggggtcgccggtgtgtgaggcagggtaagagaccaggggacctgcacggaggagcgctctaggggaggctgctgcctcgggagctagggcgcgcccggaccacaccgcacggcgcagaagcccagcgcgcacgcgcgccgcctgccgccccgcgcgtccccccgccccgcgtcgcgtccccccacctcgggagagggcggccaggcgcagggagcgtgcgcgcggcccgccccgggcgcgggcggagggaggaggaggcggcgcgcgcggcgcccagcccgcagaagccggtggccgcgcaggaggacggagccctaaccgcaacccgctccgcgccgcgccgcgccggtaggggacccgcaggcccgggggtgggggttgtggggaaggtgttggggtggggcgggagggcgggacttcgcgcttcgggtccctgggcgcagggggacccagaggcccgcgcgaccccgcctctggaaactttgtgccggcgcccccacctgctccctggcggtccttgactcttcggggcggcccgcggaggagaggcccgagaccttccgcagcgcaccctcgccggccctgagcgtgcgccccctgccgctcccccgccgcgccgcgccgcccccgcgaccctgtccctgtgccccggggctccagcagcctcggccgcgcctcctccgtcgccttccgaccccgctgaggccgcctactctcgctggcatccacccgctctggagcgcgccgccgctttttgcatctccccgaggtttctggtgcatggatagaagcaacttgactttcagcgatgccaagtgtccaacttgagtctttctctgcggtggtagatgggtgtgcgcggtgctaacatctgtctttttatttctcctaagtacccttgctccggagcgaagttgagttgttgtttgtaaagagggggtgcgtgctgtggccgccttaagtggattgtataactgtattttatttaggtggatgttgccagtggtaccagccagtgttatggtaactgggcatcccagaggctagggaaggaggagcgacttacaaatgcagttttaccatgcagagattttttttttttaaaaccaccttgtactttctatccagcaggacctccggacatttagtgtgtgttaactcgttagctgttcattatcgttttataagagaggggggtggagagcgttaccatcccgttttacagatgtaaaaacggaggcgaagagcaaactccgggtatccttagtaaccttaaaagaatagggaccaagagatttaacccagagtctcctggaattcctagtccctaaggccactcagaagtatgatggaatgttggaccgtcctccctgacattctacagatcacttaagagtcagagaggccgaggccagccggcagctccatgcctgagactcagctctgccacaaagttaagtaacactggacaagtcacagtttctctccgctcatttccttcctgctctctaaaaccaggggaacaaaggtgctgtattctttgcagagttgtgcgtgtgtctggaagctccactcccttgagctgcgatttggttattgttagttgttgtggactcataaaggcccccagtcttggttcccttgagaaatgcagggaaggaggcacccccacagtgaacgcctcttcttcgccagagacgcctgagaattcacatcagggacacttcacatcagggacaggccggggcagagaccctgacctgagggagggacgagggttgccacgaggaggtaggaaggagccctgcacaggaggcttgacacatgggccctattcctgcctccagctctgactcatcttctgacgcttgggggaggagaggtagttgcttggtatttttggctttccaccataaaactggagacagtttccttcattccaagtcgttttaatgtcactgttgaacgtgtgtgtcctgagttctcatctgaaagctttcatatcggttgactgcaggtatgaattctgtaataataattaatagaatggcataaatgtatattcatatcataaaagactagccaagtatgtaagtccaggaaatcctttaatactttaacatttttaaaaagtgggctttagggagggctatgtttgatgggttcctttgcaattgggattttaaggcaaaatggattaaaaatgcttttcccaaaatcacaagaaatacattaaccattctctgtgagatttaaactttactaataaggttaaagctttcttttgaacctcttcctcaaaagtaactgccgagtgcatcttgatcggtttgtgtatatctttttagacttttctaagcatttttataaatgtccgtttgcacaaagtggttttttaaccgaaattaattattttaaagttgacttgtcctgtttataaagatttggcttctgtcaagaacaagtaatgtgtttaagtacaactgttggtaaagttttaataatcctgatagacggtgttacttcccagggcaaggggcaaattaccccttttaaacaacttcaaagtagtagaatcattacgatcctaggttttactcttaggtgctgaataaaactttcctatttaaaaaaaaaatctaggactactagcctattgtcttgtctttgcttataaagaaacgtcaaagggagtggaagacagggagagttgctaaagcaaccaaggcctgggtataaacttacagagctaacatttaagatggctttattatttatgaaagcttcacttcacctgggtgaagacaaaggaaagtgttaatgtgggcacccttcaaaccggtaatttcaggaaatggatgggttaaaacaaaattcatgtcaggattctgtggatttatatattatacatttaccgaggacttttaccatgctaaaggtgctgtgcctgaatacagaggaagaaggcaagtaaggtcggtctctgaccttatgaagctgacaggcaaatagtgacattcagagagagttggccagaattgttgtcatggttctgaattcccagaaatcaacattagatttattgaattgtgaattatgtaaaaaagtgtctaaaacaaatggataatttgatggattattttaacgaaaacataagtgtaactgtcttgcaggtcaagaatctgactccacactctctccctcccccagaggtcctagccagaaactaccctgacttttatggaaatcatttccttcttttctatagtttttatcccctaaatataaatccctaattgacatagttttattttgcttgtttttaacctcagtgcaaactaaaagtagatactcttgtgaatccttccttctggccggcatcgtgtgtgtgtgtgtgtatgtgtatgtatgtgtgtgtgtatgtatgtatatacacacgcacatatataattttttaaatttctgcagcatgctattttaaaagatttatccatatcgttgcctatgcctgtagtttttgtgttttaatttttttagagacaaggtctcactatattgcccaggctggtcttgaactcctgggctcaagggatcctcctgcctgggcctcccaaagtgctgggattacaggtgtgagccaccacacccagcccagttagtacatttttgtcttatgaacataccacaaattacctttccactgttgatggacatctgggttgtttctggtctggggcaattatgaacagccctgagtcaggtgtgcataccttcagctttactagttgatacctggtttccaaagtggttgtaccaatttacattccttcagtggtgtcagccttgagtttgtaagtcactgtatttgctgtttaaccacaattatgcttgaatattttctgaatgaatgaataaaggtccctgggtagtccgatccctggcctgtcatgtgctagcgtatttttatttagttatatggtttggactaaccacccaaataccagaaatggttttcccactgtgtttggttgacaaatatctaatggaatcctttcatcaatcttttttttttttttttggaacagatgagtagttacaggaaattttaaatatgcaaaatgaagtactaaaaataagtggctagtacctagatgttttttaaggctcttgaatgaatcctgcctctggtgaatgcttccattgtgcccagccctaaatgtgtaggacagtgtagtgtgcaggaacccaggcctatccttgttaaagtaccctctgaggatgagactccttaagaggcactgtgcacagaccctaactcatacttcttggcaattccaaagtaaccacagactctgtgctacaggaatcaatgactcttttaaactttttttttttttttttgagacagagtctcactctgtcgcccaggctggagtgcagtggcgcgatctcggctcactgcaagctccgcctcccaggttcatgccattctcctgcctcagcctccctagtagctgggaccacaggtgcccgtcaccatgcccggctaattttttgtatttttagtagagacggggtttcaccatgttagtcagaatggtcttaatctcctgacctcgtgatccgcccgcctcggcctcccaaaatgctgggattacaggcgtgagccaccgcacccagcctttaaatcttttaaatgtatttttctccaaattttcctttgcctgagaaagtagaagtagcttagagcagagtttttgtcgtttttgttcattttctttgtaagagatggagtctagcagtgtggctcaggctggccttgaactgctgggctcaagggatcctcccacctcagcctcctaaaagctgggactgcagcatgtgccacatccagcttgaattcctgctttgtgaacagacagttaccaggctcactttgattgcccgtgtttagttttgccagctggatttgaagtgtgtgtgtgagagagagtgagagaatgtgagaaagagaaggagcaggagggagggtgtggggagaggtgggcagttcacctgagggcagccgttaaattcaggtgttcattgagtacttaccatgtgcctagtattatgtgctgtgtttctgcccttagagcagaatgttacgcaattctgtaggtttacaaaatacctcaggggaatcctttttagctggagggatgatggaagaacactagcacaaagactgagatttgtagatcctttttatttcttctctaaagcatcttggaaaatagctaaatcactctattttcagtctttatttacataagtcacaaagacttttttgctcattatagtaaagattttttttcagattctctaaaataatgataattttagaaaccacatgcggataaattagaagttttcaggaaaagacacccaaaggaggaggagtaagaagtcgttagtatgagaacctgttgatctgagtgatgggggaggagccctgtcgtgttctttgtcaccccttcggccttccagcgggcagctttcacaaaggagctccattttccacctgttgcagggcaggggcagcctcagcctgggcgagggaggaggcctagggctgagatcacagccatgccctttcatgtgcagcccacccagctcacctgggcacgtcccattctgttcttgcaccaacctagagcaaccagaggtccggttgggtcagcttttcacaccccatgccatgttgaaacctcagtggacgagaaggttcttttgaagttcatatgcaactgctgggtttacttctgtctttgtcccagaacagtttcagcatcaatgacctagggcaagtttttttgtttgtttgtttgtttgttttgactcctatgtctttgagtgtgtgggtacatatgagaaaactccctaactagagcatgctgcttctgttgactagtaaacattatgtggcagagagcgccttcaaagcaccagccttccctgcctgggaaagtgaccagtaggtgaacttgctttaagttttgttttttttgtttttttgttttttttttgagacggagtcttgctccatcaccaggctggagtgcagtggcgcgatctcggctcactgcaacctccgcttcccaggttcaagcaattctcctgcctcagcctcccgagtagctgggattacaggcgcatgccaccacgcccagctaatttttctatttttagtagagacagggtttcaccatgttggtcaggctggtctcgatctcatgacctcgtgatccacctgcctcggacccccaaagtgctgggattacaggcatgagccaccgcgcccagcctgctttaagttttaaggaagcacttgtaaaaataaaatctggaagtactgtcaacatacaaattacatacaaatttggagatttataatgaagaattttgccaatttagctaaaatctaaatcttagatttaactaaatcttttaaatctttgtgtttcattataaaacacaaaacatttataatgaagacacacttcatgtcatcattataaatctttggtgttatcctggctcctatataaagagcactggcaggctcaggccagaagtggagagggggcttggaccgacaactatgtgttgttaattttcttctattaaaaatattttttacttttagaaattgaaatcatatagaaaattatgctgggcacagtggctcacgcctataatcccagcactttgggaggctgaggcaggtggatcacttgaggtcaaaagttcaatcgagactagcctgaccaacatggtgaaaccccatctcttataaaaatgtaaaaattagccgggtgttaggccgggcacggtagctcatgcctgtaatcccagcactttgggaggctgaggcgggtggatcatgaggtccggagttcgaaaccagcctgaccaacatagtgaaaccccgtctctactgaaaatacaaaaattagccgggagtggtcgtgggcccctgtaatcccagctactccagaggctgagacagagaattgcttgaacctgggaggcggaggttcaagtgagccaagatcataccactgcaatccagcttgagtgaaagagcgagattccatctcaaacaaacaaaaaattagccgggtgtggtggcatgcacctgtaatctcagctacttgggagactgaggcaggagaattgcttgaacccaggacgaggcagttgcagtgagcagagattgagccactgcactccagcctgggcaacagagtaagactctgtctcaaaaaaaaaaaaaaaaaaagaaaagaaaattattgaaagcaaattaaccagcatcataactcaccattcaaaaatcattgctcatactttatcttttataatgcttagaaattaagtattatcaagtcagagcttccttgggccatttctcttcccttcccactgagacaaccactcccatgaatttggtacatttccttccaactctatttaaatatcaattttacttcaaactgcattttttttttttaaagacagagtctcttccccaggctggagttcagtggcacaatctcagctcactgcaacctccgccctccaggttcaagtgattctcttacctcagcctcctgagtagctgggattacgggcacatgccaccatgcccagctaatttttgtatttttaatagagatggggtttcactgtgttggccaggctggtcaaacccctgacctcaagtgatccacctgccttggcctcccagagtgctgggattacaggcatgcgctaccgcgccctgccttcaaactgcttttttgatgaatgtcaaaaggacatagaggcctggtgtggtggctcatgcctgtaatcccagcactttgggaggcctagggaggtggatggcttgagcccaggagttcgagtccagcctgggcaacatggcaaaaccctgtctctacaaaaaacacaaattaaccggatgtggtggctcatggctatcgttacagctacttgggaagctgaggtggaaggactgcttgagctcaggaggtcgaggctgcagtaagccatgattgtgccactgtgctccaggattcttgctcaaaaaaaaaaaaaaagacaagacaagactaagcatggtggcccatgcctacaatcccagcactttgggaagctgaggccagccagagtatcacttgagcccgggaattcaaggccagcctgggcaacgtggcaaaaccctgtctctacaaaaaattagccaggcatggtggcgcacccctgtagccccagctactcaggaggcagaggtgggaggatcgcttgagtcccagaggttgaggctgcagtgagcctagattgcaccactgcactccagcctgggtgacagagcaagaccctgtctcaaaaaaaaaaaaaaggacagaaatctttactagcctttattttgtactgtcacatatgttctatgtttaggggatggaactcttagagcatttcacatttcacatgatatttcttttttttcctttttgtcacatgatgtttcttgttaacaaaaattggagaagtatttagtgttttacagagcttcaattacttggtgtaaactttcagccaaaggtgatccaaaatggaaatggagtagaacttgttttgtgtactagattgtatcttttttttttttttttttttttttttttttgagacagagtctcgctctgtcgcccaggctggagtgcagtggcgcagtctctgctcactgcaagctccgcctccccggttcacgccattctcctgcctcagcctccccagtagctgggactacaggtgcccgccaccacacctggctaattttttgtatttttagtagagacggggtttcaccgtgttagccaggatggtctcgatctcctgacctcgtgatccacctgcctcggcctcccaaagtgctgggattacaggcgtgagccaccgcacccggcctagattgtatcttaaatccaaatgactactgtattatatgaaagtaatcagttttttttttttttacaaaaattacacttacggagtttcttattccatttatcctcctagaaagtacaggagatattttttccacaatatcagattactcttaataatatttttagattccttctaaaaaggtacttactagaaatgtgaattcccaggccttcacttccagaaattctgattaattaggtctggggtggggtctaggagtctgcattctaacaggcagcccaggtgattctcgtgtaggactccttgggagcacactttgaagaatgcgtctactatgctgtgatggttttataacttactaatttcaaccaaggattggtgtagtagcccattctcacgctgctatgaagaactgcctgagactgggtaatttataaaggaaagaggtttaattgactcgctgttccacattgctggggaggcctcaggaaacttacagtcagtgcaggcaggggaaatgccagacgcttataaaaccatcaggtctcatgcaactcactcaaaatcaccagaacagcatgggggaaaccgcccccacctggtcctgcccttgacacgtggggattatgggaattacaattcaaggtgagatttgagtggggacacagagcctaaccatatcagttggcaaactttcttttttttattttttaaatttttttattttaagagatggggtctcactgtttggctcagtctggagtacagtggcatgatcctggctcactgcagcctcgaactcctgggctcaagcaatcctcctgccttggcctcccaaagtactgggattacaggtgtgagccaccacacccgaccctctagaagtgtttttgtttgtttgtttgttttttgttttttgagacagagtttcgctctttcacgcaggctggagtgaactggcgcgatctcggctcactgcaacctccatccccccgggttcaagcgattctcctgcctcagcctcccgagtagctgggattataggtgcccaccaccacacctggctaatttttatatttttagtagagacggggtttcaccatgttggccgggctggtctcaaactcctgacctcaggtgatccactcacctcggcctcccaaagtgctaggattacaggcgtgagccaccatgcccagcctagaaatgttttactaattagtaatgtagtcttctaaagggaactattacattgtcatattgtgtttccagacagtattttttcagttaaagccaagggaataacttcaggatcctctgccttgggacccctctcgttcagctgaaaacttcatccctccctttgctgtaggatggcacagacacccagttgccctcacagtgcagtcggactgctctcagcatgggagcgggcatggccttcgccagttgcctccatcccgctgaagcagaagactcagctgtttacctcaccctgctcggaaactctagcgtggtaattataggtgcctttgatttgtaaagaaaaatgggaaattaatttattagtacattataagtgaagttaatttggtataaaatcactaaaagatgtggaattgggccaggtatatggtaaggaagtcctcatagggtgaaggttgaaactctccgctggagctttaaggattttgatatgtctgatgagacatcaaagatgatcaaagggtgattattaactactgagctgttagtcctgtgaactttattctaatttataaattctgttctttatcttcccttaaagtagtaatgagcttgtaaggactgaaatcttatttatgaaaagacctgcattttctgagatgtcatggtcttgcttctcagagggcagtagtaactttgacagttttgaggcaaactcacacctacctgggttttattgctgattagtgatttttttaagcactttgcctctagatgttctgagttacataaataacagtttatcatttaaccaagcacatatgattcacatttaatttttaccacttagtcctggaagactttaaaatgttatttatataagccattgctcaaattggtttccagttatcattaaacaagtttaaatacagctgtggacttttgcgagctttttattggatatttcacacccgaagaccatcttgtaccaccaacagtttaggattcttagagattactccctagactgtagacgtaaagcacaatcacatcgacctgaccttatgttccttaactcctttcttgctgcagtttcccgccccctccccgccccagccagtgaaatgtacattttggtagactttgaatggatggatccattgtggtccaattgtatgactgagccacaaatagacaactcatggaaggacggttctggtcccagtggggctactaattttcaatgtagagtctgggaaagcttcttaacctccatttacctctgattctctgggaactgcaacagcagaatgatactgatccgggagaggctgagcagtgcttacgtggcttatgtgggacagatgcccgaacgtgctgccacaggtcagatggggcagaatgaggcagattttcacattgtattaagttagtttttaatgagtttaatcttcagtttgcacttttcaaaaactgtgtatacagatcacctgggatcttgttaacctgctggagccgattcggtaggtcttggaatagagcctgcgttctgcatttctttcaagcctccaggtggtattgatgctgctggggcttggatcacacttgctaaatggtgagggctgtagaaaagggctgtattctccattccaatggagaatagcccccattccaagtctaaaacaggaggctcttttttttttagatggagtttctcatcacccaggctggagtgcaatggagcaatctcggctcactgcaacctccacctcctgggttcaagtgattctcctgcctcagcctcccaagtagctgggattacaggcgcccaccaccacgcctggctaattttcgtattttttagtagagacagggttttaccatgttggccaggctggtcatgaactcctgacctcaggcaatctgcctgcctcggccttccaaagtgctgggattataggcatgagccaccgtgcctggccaagggggctcttgaaaggcaagaatgggaggagaaaaagcatggtatacaatctataaaacaactccccaagaaacaactcaggttttcagtactatgggctgtttttactttgctttgatcaccagtttttttgtaccagttgtttcgttcactcaatggtagtccatctcttactgttattcagttgtttttatatgtgtatcttgtgtcatttctgttagatgataaaatcctagcacagggttatgccttatgttacctgtatatccctgctctagttactactgctgcataacacagctctaaaactcgttgtaaaataactatttgttttgtttgcttatcaaacaaaacttgtttacaagtccctgttttttttttaagacagagacttgctctgttccccaggctggagtgcagtggtgcaatcacagctccctgcccctttgaccttctggactcaagcaatccttctgcctctgcctgccatgtagctgggaccacaggtgcacatcaccatgcccagcaatttttttttttttttttgtagagagagagtcttctcacattgcttcagttggtcttgaactcctgggctcaagcagtccttccacttcggcctcctaaagtgctggaattacaggcctgagccactgcccctggcctaaaatgactatttgtattgtactcacagattcctgtaggtcaggaatttggacctcactagtaggggcaacttgcttttgcttcacaatgtccgaggccttaggtaggagattcaaagcctgggggtgacttgatggctgggagctataatcataataaagtatctctacttacatatctagtggttgagcttgggtatcagctgggactcagttgggatgttagctaaacacccatggcctctccgtgtggtagctctgttgagctagtttgggcttcctcacagcatggcagctgggttccaagggcaagtcctaagagaacaaggtagcagtgtgcgacatgtttgtgctctggcctcggaagcatcatttctactgtatttttttgtttgtttgttgctttaaagacagcgtcgttctgtcgcctaggttggagtgcagtggcgccatcgtagccccctacaaccttgaactcctgagctgaagcggtcgtcctgcctcagcctcccaaagtgctgggattacaagcatgagctccacgcccagcctttagtgtattcttttggttgaagccatcacaaaggtttctcagggttcaaatgaggggacatcagccccactgttggatgggaggagtgtcaagattacactgtagggtctggccacagtggcttatgcctgtaatcccagcactttgggaggccgaggtaggtagattgcttgagcccaggagtttgagaccagcgtgggcaacatggggaaaccctgtctctataaaaaatacaaacattagctagccatggtggcgcacacctgtggttccagcaacgtgaggaggctgaggtgggaggatcacttgaacctgggaggcggaagtggcagtgagccaaaatcataccactgcactccagcctgggctacagagggagaccctgtgtcaaaaacaaaacaaaaaacaaggttacattgtaagaatgtcatgtgagatgggagatgctgtggccatctctggtgaatacattctgcagcagttggaacaacactcagcagggtgttgaccgcattatataaactcagtgaaagactgttgtgtaaatgagtggtaggtaatttaagcaccaaggtgggtgaggaccaaatacaagaattcaattccagatgtgaacagattaccccatggtaccaagataaatgcagaccttccaccttttatagttattgatagtctcttcttgctatctctactctttctgtttccaacatggagaatctgtgaattgatcacgtggaactgaacttcttcaaatctttgcatttgtgtcacgatgctggcatggtttttcctgcttatctagtgtactgcccctctccttcttgggctgtggcatatcccagcagctggctagtatcttacagtgatggggctgggcgtggtggcccatgcctgtaatcccagcagcactttgagaggccaaggtgggcagatcacctgaggtcaggagtttgagaccagcctggccaacatggtgaaaccctgtctctactaaaaatacaaaaattagccaggtgtggtggtgtatgcctgtaatcccagctactcgggaggctgaggcaggagaatcacttgaacccgggaggtggaggttgcggtgagccgagatctcatcactgcactccagcctgagtgacagagcaagacaccatctcaaacaaaaacaaaaaccaatgatcggcttctcttagcctcagcaaatgcagtgtgaacaggcgctggtccatctgcggacatcgagatggctggcctggtcacacctacataggcagctgctctgtggctgcatgtcacactgagggactatctgtggctgaaccggagtgtgactctcagtctttggctttatgtatcttatgtgtatttatcctcatcatatcctcatcgtgtacatatcctcatgtattatcctatgatatcagttaattaatacagtgagaaaagcaaaaacgatccctcctccaaagtaagtagaagatgttgagatgttttaccacaattgctaaagctttccaggtgacagaacaatttgtgaatatcttttacttcattttactttaatatgtatatatgagacagggtcaccctggctggagtgctacaatcatggctcactgcagcctcgacttcccagactcaagtgacctcctcatctcggcctcctgagtagctgggattataggcgcatgaaaccatgcccggctaatttttaaaattttttttgcagagacagggtctcattacgttgccccggctggtcttaaactcttgggtttaaggagtcctcctgccgcagcctcccaaaatgctgtgattacagttgtgagccactgtgcctggctgaaattttacttttttgtttttatattttgcgacagagtcttgctctgttaaccaggctggagtgcaatggcacgatcttggctcactgcagcctccgcctcccgggttcaagcgattctagtgcctcagcctcccaggtagctgggattccaggtgcacaccactatgcctggctgatttttgtatttttagtagagacagggtttcaccatgttggcttagctgttttttgagttttggggtagaaatggggtttcaccatgttgcccaggctggtcaccaactcctgagctaaagtgatacaaccaccttggcctcccaaagtgctaggattatcattttcattactaaatcagaaatgtgggccggacctggtggctcacccctgtaatcccaagatctcttgagcctgggagatcaaggctatagtgacctaagattgtgccactgtactctagcctgggcaacagagtgagactcggtctcaaaacaaaaagaactagacagacatttactttattagaaggagaaaatgtgattacaaaagctttttgaatataaaaaggtaacagtgtaggcctctccagtatatactctggccctctgaaattcctaaaactgaaagtattttagtgagagcattttacacagtcatctgaagcactgttgtggccattttctgctgttgactgaacatgaaaagaaaagccgtagatagaatttcagttaactgctgattctggtggttgtcatcttttttttttttttttttttttaaagaaaagtaacctccgtggcattaggatggatgctgtctctgattaggccatgaccccatgtagcaattctgagtgtcaggtaccactgctccaggtatggatgccagtgctgaccacaaggctacaaggctgatgcccgcatcccaggagctctgtggagcagggagcaatcaggtgttattaatattagtgtatgcattactgagattagaggcccgctgggaagacactaatcttgtattttgttcagtacttagtgttcgatgcttattatccaaaaagaccagcatcgtctctgagaagatgttaagaacaaaccagactgggctcagtggttcaagcctgtaatcccagcactttgggaggctaaggcaggtggatcacctgaggtcaggagttcaagaccagtctgagcaacatggcaaaactctgtttctactaaaaaatacaaaaaattagctgggcatggtggcatgcacctgtaatcccagctactcgggaggctgaggcaggagggtcatttgaacccaggaggcggaggttgcagtgagccgagatagcgccattgcactctagtctgggtgacagagagagactccatctcccccccgcccccgtccccctgcaaaaaagaaaacaaaaaaacccaaaaaaccctggggttggtttaggacagctcttcctttctgtctttcactctaccctacccccatcccccaagccaggaaaatattttttcctccaagaagcacgtgccattgccagagcatcttgggaaggccaagttgaacaccatagacagtgatgtggtcattcttaagcattcttcctggtcatcatcgtcccagagaccattgtcctgcagtgggatggcatgttcactcagagagcaccatgcaatttgtgatccctcaaatacgggtcaaactctgctaccctatctcctttccctgtctcccaggacacatttactgagtagattttcatgcacctgtgatataatacccatgggttttttattttttaccatccagttctactgatctgatctgagaactggctgactctagggcttcttgtagtgcctactctggggctgctccttgctgaggtccaccctctgcagccagggggatgttttgtgcaccaaatggtgtaccaggatgtggcagtagttccctgttctggcactaggggaaactggagcagctcggcccatctgggcttagcctttctgtaagtagcactgaaacaccttcttaggcagatccacacccccccgcgtgtgtggcagacgctggctggtggtgtggagcgccgcgaggcaggtgatgagaacacagccacgatttagtcaccgcagagaagcagtgtgtggacttgagctagaaatccggacaccttccatcttttcctagtttcacttctcaagttgaaatctctcaccctttctgaaccatgtattttccaatctgtcaagggggtcaggagtgtttgtcagagaagcatctatagcatctgtgccctctacgtgccctctggcggaagttgttttcctgaaactttggaccagctttggcattttaagcaggtttgttggcaaagagatggactggcagcagcagggagggagcaatgtgtctgtctcacttggattctgccccgagggctcacaatctgttttccctgcagcaccaagtaccctagcgccactcagcaaatgcgagttaacggaatcagcccggcttctacagggaacctgggctcctttgcctcaggaaggcaagtggcttcccagacagcgtaatttgggaggatgcatcgctctgccacccaggctggagtgcaatggcgcgatctcagctcactgcagcctcttcctcccgggttcaagcgattctcttggctcagcctccctactagctgggattataggcatgcaccactgcacctggctaatttttgtatttttagtagagacggggtttcaccatgttgcccaggctggtctcaggtgatctgcccgcctcggcctcccaaagtgctgggattataggcgtaagccaccgtgtctatggccaagcctctctgaattagacaacaactagataacctacttggaaatttgattagcatcttccagattttccacaatgaggagcgtcatccccagcagcttgaaggcctaattttgtgtttattaccacagtgactttgctttttaaaccagtaggattctgccagggaagacttggaagtggcaggagaccctgctctgctgtaggaaaggatgttctcagagtttctgccctgttcatagtttacatccaatgcacacacacgcagtttccttatgtgactgcgtccttgttcctcctcatgctgtgatttcacctgtggactgctctgtgtactcccatagcattaaccagtcatgggatgtgggctcccaaagcgaggcctagcctcgagtgaggaggcagctcccttcagagaagggcagtgtccaggagggacttgtggtctgttagcaccagtacacctggtgcctcagtcttccagggggaatgcagacagagccacagcactcacctctgcagcagttctcagacgtgcccccgacccgcagcctcacctcagaaaggcaactcttccagccccactctggagggacggaatcagaagctggggaaaggtccagcagtctgtgcgcacagccctctgggggattctgaggcatgctcaggtttgagagcccctgcattataatgatagaaatagttgtaaatggagccaggcacagtggctcatgcctgtaatcccagcaccttgggaggccaaggtgggtggatcacttgaggtcaggagtttgagaccagcctggccaatgtggcaaaactccgtctctacttaaagtacaaaaaatagcaacgtgtggtggtgcacgcctgtaatcccagctactcaggaggctgaggcaggagaatctcttgaacctgggaggtggaggttgcagtgagctgagattgcgccactgcactccagcctgggtgacagagccagactccatctcaatatatatatatatatatgtatgtataaataaatatatatgtatatttataaactttttttttcaaaaaccattttaaaatgttaaacatacgtgtcataggacccagcccttcactcctgggtattgaactgagagaggaaggcatatgtacgcacaaagacctgtacgtggatgctcatagcagctgtactcacaatacctttaaactagagacaacccaggttcatcagtaggtgaatggataaacagagtgtggtgtatctacacagcagagtacttaagaagtgagctgttgataacccagcgtcatgggtgaatgtctaagttatgcagagtgaaagaagccagaccaaaaaaaaaaaaaacccatatatatatatatatatatatatacacacacacacacacacacacacacacacacacacacactctatatatatatgtactatgtatatgtgtactatatatgtatatatacactatatatacacactatatacacactatatatatatatatatatatatatatatatatatatatatatatatatatatagtgtgtgtgtgtgtgtgtgtgtgtgtgtttagtttttgagacagagtcttgctctgttgcccaggctggagtgcagtggtgcaatttcggctccactgcaacctccacctcctcctgggttctagtgattctcctgcctcagccacccaagtagctgggattacaggtgtgtgccatcatgcccggataattttggtatttttagtagagacctgggtttctccacattggcaaggctggtctcgaactcctggcctcaagtgatccacccgcctcggcctcccaaagtgttgggattacaggcgtgatccaccacgcttggcctatatatatttatatgctataaatatataaaagtccattgatagaaaagtctagagtgcaaaccatagtgataagaaagatcagtggttgcctgggaatggggtaaagagcaagaaagggttggattattaaaaaaaatgaggaaattttgagggggatgatggatgtgtttattattatgatgtactggtgtctccattgtgtacatatgtcagaactcatcaggtaatgtacctgatcaagttgtatagcagtttatatgtcaagaacacctcaacagagctgtaaaaaaaacacgacaggtctgacagttacctgggaaaggtgggggaacaggtggtagaagaacacattttttatgatgttcatggtacttacataacataaatgaataaaatagggccaacatggaaaagaaaacaaaatgaaggaaaatgtcaaattgccatcctgaacaccagcaccgcctgtaattagcgttcctggctgcagccacatctgcggtcctgctcctcatgaagccgtcctccgtgccatgtcccggccatgcctgtccttagcttcctggtgcacactgtcctccaccttgtgttcaggcacagggctgcttggctcacccttgctgcacctggcctgtccgtcctcccaccgcggtgccgcccaggccttcccactgcagggctggctaacggtgcatggaagagactcgagtccgtgttgtgtcctcatagcccaccgaggaggcagcagtgccggacatttcgcggataggttgtggtctctgagtctcctcctctcaagaggatgagatttgtctgtgttattgtcaaaactcttatttgtcacgccgcgggttatgtgtcagtaacaaaaagctgagatttaggccggtgtttcttactggtgcagcctttaaatgcacacctgcgaatgttcagtgcaccttccgcttcctggctctatttcagtcaaacctgaggtcgtagtgaaagtcggtgaggaattctttggaacttcctgattggctgtgtccttgcctccttgtcttcccgcagatttgatttgtatccactgtcaccagcactgctcacttaggactttctggatccggacccaggcagcgcacactggactcttgaggaagtgagtaccccaccactgcctgcctgttgaacccggggaggctcttgtctgactgaaatcactgcaggcttcccgacgatcccctgggtgtgtgtgggcaggcgcacttgccactgggcacaggtgataaagcattgtgatttttttttttggtgagaggaacggatgtatctaagatctcaggaaactgagaacttccttttctgctcttattaaatgtcaatatatatataatatatatcaatatatatgtaaatgtatatattgacatttaatagcaaacactggaataatgagaggatagtgacgttcagacgttaaaagccagtgggcttcatcgtggagctcagaattaaggtgaagttatttagccacacccaaggtcaggtcaggtaaaatgctcatttaacttacaggaatgaactttgaagaccatggccttcaaattgcctgggattatttccatggaaatgctactgtgtttacattgtcacgaaatgataggaaatagtttttggtttgggtttttgtttttgttttgagacagagtctgtcacccaggctggagtatagtggcacgatctcagctagttgcaacctccgcctcccaggttcaagcgtgtctcttgcctcagcctcccgagtagctgggattacaggtgctcgccaccatgctcagctaatttttgtatttttagtagagacagggtttcccaatgttggccaggctggtctcgaactcctgacctcaggtgatccacccgcctcagcctcccaaagtactgggattacaggcatgagctacctcacctggcctttccttttttttttttttttttagaagctgggtctccctgttgcccaggttgcagtgtggtggtggtgcaatcacagctcactgcagcctcgacctcccaggctcaagtgatctgcccacctcagtctcctgagtagctgggactacaggcatgcactaccacacccagctaattaaaaaaaaataaaaaataaaaaataaaaagtttttttgtagagatggggtctcactgtgttgcccaggctggtcttctggtcttgaactcctgggcttaagcaatcctcccacctcagcctcccaaagtgctgggattacatgtatgagccaccatgcccagccaccccccccccaccccacttttttttttttttttttggacaatcaccagagagctgaattttacattgatttcacatgtttgtgtcttaggtgacttttcccaactgttaattgatagaaaatgatttgtctgtatccttgaaagattgtactgtattatttaaaaaaaaaccctctaatcttcccatttgacaaatgtgacagaaggctgtgatgaatcagtagcatttaaagtactgacacatacctgtattttgcaggaaggagactctaattttggattccttggtggaggaaaataaaacactctggtcttgccgccaacgatgcaagtgtgactgctggcgtcttcatgagctccagaggtcacagcacgctaccaaggactctcatggcccctcggatgatttccgagggagacataggaggcattgctcaaatcacctcctctctattcctgggcagaggcagtgtggcctccaatcggcacctcctccaggctcgtggcatcacctgcattgttaatgctaccattgagatccctaatttcaactggccccaatttgagtatgttaaagtgcctctggctgacatgccgcatgcccccattggactgtactttgacaccgtggctgacaagatccacagtgtgagcaggaagcacggggccaccttggtgcactgtgctgcaggggtgagccgctcagccacgctgtgtatcgcgtacctgatgaaattccacaacgtgtgcctgctggaggcgtacaactgggtgaaagcccggcgacctgtcatcaggcccaacgtaggcttctggaggcaactgatagactacgagcgccagctctttgggaagtcgacagttaaaatggtacagacaccttatggcatagttcccgacgtctatgagaaggagtcccgacacctgatgccttactgggggatttagtgccactgaagcctgcgtcagcagcccgagcggggccggcatctgctccccgccgtctgctccctctccactctcttctcaaatggctgacttctggttctccctcaagtgttttttacactgggtgttcaaatttattttaagagatagggagggaggggacataaagggaatgcatacattgctagtcacatttttaaaattaacattttggaatagtgtttatggaaatctttagcttttaatcatttttaccaatttgaacagtttaataaactggttctgctctcttctgaatctcatgcctttggcaccttggtaggtgcaggaggagctcagtgcaaaaatcactttggggcctcattaaccctttagagacaagctttgccccaggctgcggaccagacagatgcttagggaaggttgataaccagcttcagtctctactggattagccctactctttcctttcccctccattatttagtgactctgtaagtaagttaaatacacccttattatttagctgttaagtaactataatgaaatctgctgcaaaatctctcttggaatccatgtgcccaggattatattagcattatttttaataaatctatatgcttaacatattagaatttttactaataatttcaaggtgtgtgtgtgtcgatgatgggaaaaaggtgctctccagtaactaactaactaactgctgaaatgtggctcctgtgccagttgggaacattacttaaaatacacatcccagcagagtcttgtcggcgcgtcacatcctggtggacaggcagacacaccgtccccggtgctgggccggtgggagatgattgatagtgcacgctctgatcaggggtgctggttttggtttcctcttggttagtggagcgccccgaagcagcgtgtcctccatcagagaaactggttttcaataaaaggtgcctctgcttgactattattaccacatacgaaaatgccctaaaccaaacctcagtatgagcgataagcaagtaacaaaaacaaacaatggctgcctttgtttaactttgggactgtctgtcacccagttcactgctcctgataaaacgggcagcaccgctcatcatcatcagatacatggtagaaggtgaatgagctcgcccctgtcccactcctgggacactcctgggcactttccacgtgcccccaagtaaccactgtcctagggcatgcctttcttctgcatggagggcatcctgggcgtctgcccgtgcaatgggaacccgctgcggcactgctctttggcttcatttatcaggaaggttgtagcttgctcaccagaggaatagttttctagattttttgggtcagttttggcaggaagccatacataggccagtagctacatatttagacaaatatactccacattttacctggtttgtggcaatggttttttcccatctaaattctaccttttattgctttatacccgtggctgcccactgttataaacatgcatcattattctctagaaaaactaaaatgaaaaaaattattaatagtttctatgggaaatcagaggaaacaacaaatgctataagatcaaaaaaaaaaaaaaaaaaaaaaaatccagggaggctctggctgctttagtaggaggctcagctttgagtctgggagtttctgaataagagcacccaaataaccattgtcctagggcgagaagacacctggtgacagatgttcttggtaattaatgaaaattacctgtagaattcctggcaagcagcactacggggctgtaactaagagttcctcgcacgtgggaagctgaacacctttgtaatcttaagcgcatgggcccctgttcatcctagtgacttgcatctatgtgaaatcaacccaacaaagacaagaccaagaaaaggcttagtagcctgacattcttctacacttgtattttggttagagaagtttaacaaggggtgatttcagaacagaccctgaaaatattttaaaggtaaagctttataatgtctaaacacatcaattagagcagttgtttattaaaatacaaacaagggagaaaccacaccatcttttaaaatacaggcgcgaattccacatcacgcagaagacaacgcatttcgctaagggccacagcattcactggttaataaagccacagctacaaagtaatgagatgtcccacatgaatactttttaaccacttacattcacgtcaacatataaataatggaattaagtaaaaacttcattataatgctattttgttagaaaagtatttgtaaagtggcatttttcccccaagagctgtttcacttaagctttatttcctcggcctggcaaggggagggcttttcagtattgttatttggtacacacttacctgaagaaataagtaagtaacttaaacataaaaaacatagtcgacacacatcttgccctgcattctgacatttgctggaatggtctacagcaggctacaatgctcccttctgaatggcaaatgtctgaaaatgtcagtttattaactgttcacaaaggcaggcatttgaccttgaaggtgttaaagggaattttttatttttgagacagagtttcgctcttgttgcccaggctggagtgcagtggcgcgatctcggctcactgcaacctccgcctctctggttcaagcaattctcctgcctcagcctcccgagtagctcggattacaggcacctgccaccatgcccagctaatttttgtatttttagtagagacagggtctcgccatgttggccaggctggtcttgaactcctgacctcgggtgatccacccggctcggcctcccaaagtgctggggattacaggcgtgagccaccacgcccggctaaagggaatttttgtagtggtccccagtacagggccagcatttcctatttctgtaacatacagccctataatctttgcaaagctgaagtacacttgaaataggcaaacagaagacacctttaaacaaataagacccccccaaaacccttcaaatatgtatatgtacacaaaatattcaaataattaaaaattcacaacccctatggaatgctaactagtagccacaggaaaaataaagcatggaaaatatcctcatatatccagtacctcttctatctcaagcatgtccagacaaaaattaaattacacactaagccataaaaattttaaaggcaaaacatcccaccaaaaaaagaaaagtgcttattaatggccattcaagcagtggggtgaagcgggctgacacaatgcacagtatggaaataagtaaccttggctacagtttccaaggacacggggctcctggctgacaagaagagctgaggtgaagctgaatgcagcgttgagccattttaataaacgtttataaagaaaagcagcgcaaccgtgtcccacactccttggatccctattggtggcatctaattaaacatttcaagtattcaagagatatgaaaggtagtgaatacttttcatagcaaaggctttttttctgttgacatctgctgaattttcctgtggcacctcccaaggagtgactaagcctaccatccttggtaaggaaaatggggattatactaaggaattttatctgaggcattctggaatttctcaggaatagaaaccagcccagctaccaagtgagctttttaaaatgttgatactgggccactgtgacatgacaggcatctatatagcatttcaaaaaaatgcttcagcaatacaaattcaaactgggaaacttttttttttttttttttaagagacagtgtctcgctctgtcatcacctacgctgtcacgtgcagcctcaaactcctggacttgtgatctcccgcctcagcttacctagtagctgggaccacgaatgtccacagatgcactccacctacccggctaattattttttgtataattagctggggtctttaccatcatgcccagggctggtctctaactcctgggaaacattcttattgcaaaggtagattctgctgtcatggttctgttatgaaatttaggccaggcgcagtggctcacgcctgtaatcccggtactttgggaggctgaggcgggcggatcgcctgaggtccggagttcaagcctggccaacatggagaaaccttgcctctactaaaaatacaaaattagctgggcgtggtggtgcacgcctgtaatcccagctactcacgaggctgaggcaggagaatcgcttgaacccgggaggcggaggttgcactgagctgagattgtgccattgcactcaagcctgggcaacaagagtgaaactccatctcaaaaaaaaacaaagaatttttaaggccaattagcagcctgcttgcattccagctccatgtggaagtggtgctgtccaggatggaagcgccgaggcctcaggaaaagcctgccaaaagctgtcccacttgtgttgttagaaacaccccactagccttgtggtgggcaaaagctccaaaggtgcccattcagagtgagctgcctcagtcaggaatggccagagacggtatcatcgggagcgagtgagaaaagcctttctctcctcggtgcctctctgtgcattcgggcacgcagaaggtcaagcagaagcctcagcaacagctgtttaatgaaaatgttccacacctttcttggagaacatggaaaagctgtaagatggagcaagacagaatttgtcctgagaggggaaaataaattatgtaaaagcagcaattatatagacaagaccaactttttcagtttaaaaataaaagtctaggtcagagggtctaaaccacacaaagtaaagcacacgagattgaaaaatctcttcataaagcgcataatcaacaattcagagagacgtgtgccctagattggtagttcttcccaggaataacacagctcttagccacttgggtttttcccctaattttatgcattcacattaaatggcaaagacaattccctactccaggaagcatgagccttttctatctaaaattcagtactgtttctggacaattttcttctacttcttctaagtcatgtatctatcccataaatatacatcttgatactttacactaggccgagagctccacattttcaccctgaattaattttcaggtttttctcacagatactgcaaagtcaggcagtgttggtccctatgcagtcatctttggaaatttggagagaggccactgcaaagagatttcattccactgcctttccaaatcttgtctgagaaaactccatggtcacagtctttgcatgcggcagaacaggtttgcagcgaaggctcccggggggaaggatattatcctaatacacaggatttgggcctctgtcaaaatgagcattcttcacggctgcagagtgcccaggcatgttttgggaaaaagtcttgagagtggacagaagtgaagggaaggagtagagaactggttcagttgtgacaaccaagtgggtaaaatctgccctcacctgcctgctactgtccaggggagatgggcagaatcttctccataaaaagcagaacatcagtttaatcgcaatttcctctttttattcatttcagacattaacaaactaaatgcagataaatgtattctacttcacaggacagtaagtgtcctagataaaaacaagcactggctccaagcagtcgcccattctagtcccgcaacggtaatctatttttcttcaaatgtcagttcttcacagtttcaatactgcagcagcaagttcttccttagatcaagaaagccgtggtccgtatttcagaaaatcttaagtagagataagtgagcaagcttctggtgccacgtgcagtttgggtgggacaattttacctgaagtcctgcagactggccgtggggatgacgggggccccgtcccttgcggtgttcttcatatcgattcagggaagcgaactgtgcagtgctcgcattctatttattggtccctgtcaccccgtggggtgtcacagaaaaaaaaaagtcaatgcttcacagaggagttgttcagagcaggtcaggcaggacgaggccaggaggctttggttcgacacagttgatccagaagttggcacagctggcgtgatactggtgccctccataggccagcttgaaactgtctgtttctgagttgaatgcctgccagaaataaacagagatgtggggcaagtcaggctttttctgcatctcagagcttttcagcaaccaacatgtacatctatctctccaggtcacagaggctgaggccaaaatggcacacacataaaagctgagcggatagctacaggaattcaagagagaaggttttttactgctaattaaaggtataaaattgttaccactaaacctagtttcagcaaaaggtggccaaatcttccatggaaaaggcagacagaggttatggggtggagggggggaatcatgataaggggaactgaagtagccaagggctgtggatagctttcatccctcactgtgctgaaggaagccctcctcctaaggccggcatctgactacagcatgcaatcctttacactcctgtagctgaccacaagcctatcatgacaaaaaattacaagagagttagagaacgagagagttagaaaacgagagagttagagaacgacagataacaactcttagggtctaatggcattgaccctaatgcctaatgaatctacattatcaaaaagtccaaacaggtatggagttaaaaaaaaatgcctcgaaatgaatgggcattaaacacataagaattatttccagatgaacaggcttatcagtaagctacagtcagccatggaaaagtagagtccaaacctcaaccacttcctggggttagttttctaatatgcactgcaaataaacaaaactctaaaacccaatttgctgcttgtctgttaaaatggctaaatggctacatcctgaagctctttgatctccatctgtgtgtcactacaacttccaggcttccagaagttgctcattctgtcaccccattcatcacagagaaaaataactgcaacaccagaagccaattatgtgaaacaagcatgcaaataagacagaagtggacccacacagacacattaggagactccatcaaacattatgggaacaaaactgactcagtgaaggattcatgattggaacagttcaggatggcaatggatagaatcatccaatttgccctccacactcaaaattaaaatggagacgctaagataaggtgtaactggttcatacttttttaggatgttcttctgcaggcttctcttctttctgaaataacgttgaaaccacaggtcaacaacattcccagaacagggcctcttgcctccaaacacatctttacaggttcacccttttcccctgacctccccactatgcacagggtgctgcaggcatgagagccgcgtccattccctccacagctcccccgctgccctctcgagggaatgtgtctgctcctaccatcagcttttaggacttgagaaaatccccacctctggtcacaaactctgcagtaaagtgggccagatgaggttgtccagagtcatgttagggaagccctttgctgtctgcaaggaggctgcgtgacttacccggctcctcgagtccacattcaagaggcacactccacaggcaagctcctgagcatttttaatcccaggccgtaacatacaggaggaaaaatccagcgagttttcatctggctgtgaggacgacaagacaaatgggtaagaagtccacaagtccacacgctgttcacttcactccctcatcactcacccccagcaggcctagcggcaagtacagtactctaacaccaccactacaagaattaacctcccacacatccactgggaacctgccacggttccaggtgctaggaaggccggcaccagtacaacacgccctctgacctctgagaactcagtctcaggtgggcgccaggggagcccgtgcagtgccatgagtgctgggtgtgcttacttgggggaagtcctgagtgccagggcacaagggagcggcacttagcccaactcgaggaggatggggcctgaagccagagactgcgtcctagaactttttcttttcttttttttttttttttggagacagagtctcactctgtcgcccaggctggagtgcaatggtgtgatctcagctcacggcaacctctgcctcccgggttcaagcgattctcctgcctcagccttctgagtagctgggattacaggcgcgccaccacgtctggttaattttgtatttttagtagagacagggcttcaccatgttggtcaggctggtcttgaactcctgattgcaggtgatccacccgcctcagcctcccaaagtggtgggattacaggcataagccaccgtgcctggcctgcttcctagattctaaaatcaccttggctgagtgtagatgggagctgctaggtgagggggacaggagggttgggtgaggtaggggagggaaggatattctatgcagaacaagcagcacaggcaaaggctctgagctaaagatggggtatgggaaggaatctagagggtgggggcagggcccagggaaagaggagatgaagccgcagcacgaggactccaaggaagataaggagcatcctggaagccactaaggcttccaactggatcacgacaggcccaggttcgtattactgacagatccctctcgctacagtataggcaatgaattgggggtggcaatcctcagggcacaggcctcagccagaagtctgctgtagcagtcctggagacagataccgatggtcagaatgaaggcagcggcggtggggaatggagagaaatgggcacgtgaaagagctgacgaggcaggagaatgagcaggcctgggtgacctgctggatgggagaggttgggggacccgggcagctgagaggattcaccataataagacacgtgagagaaggaccaggtttgaggatggaagctgaggagaagagttcagtttggtccaagctgagctggagctgcctgtgggacagcgaaggccacatgctatataagcaggtggttggatacacatacaggcctcctgcttgtggagagatctgaaggtcaccagctaaagaccataaatagaacaacagctaatacgcccttactttcaagcactatactaagctctttatatgcattatctaattcactacacacacacacacacacacacaatggttaaaagggtaggtctcaatcttggaaagccgtccagtcactctgttgctcaggctggagtacagtggcgtgatcacagctcactgcagccttgaattcctgggctcaagagatcctcagcctctcaaatagctggggccacatgtgcatgccaccacgcccagctaattttttgatttttttgtaaagatgattatctccctatgttgcccaggctgatcctgaactcctgggctcaagtggtcctcccaaagtggtgggtttacaggcatgagccactgtgcccggccccgcagcacacttttatttttatttatttattttgagacagggtctcactctgttgcccaggctggagtgtggtggtgtcatcttggctcactgcagcctccgcctcctgggctcaagcaatcctcccgcctcagcctcctgagtagctgggactacaggtgtgcaccaccatgcccagctaacactttttttttttttttttttttgaggtggagtcttgctctgtagcccaggctggagtgcagtggcgcaatctcggctcactgcaagctccacctcctgggttcaagggatgcttctgcctcagcctcccaagtagctgggactataggcgtgcaccaccacacctggctaatttttgtattttgagtagagacggggtttcaccatattggccaggctggtcttgaactcctgacctcgtgatctgtccaccttggcctcccaaagtgctgggattacaggtgtgagccaccgtgcctggccacacacttttaagtttaatctgcactaataacattttctccatcactttttagcactgaggacatccctcagtcctgaccaaacagggacagttggttgccctgtgatagacataaataaccctgaaagctagacaagagtaaaatttaagaactagaatgttttaagtattaccactatttttaatataatatatgtaactgcaagtttatatcatttgtgttttgtcttgcttttgagatagaatctcactctgtcacccagggtggagtgcaggggcgtgtgtgatcatggctcactgcagcctcaaactcttgggatcaagcaatccttttgcctcagcctcctgagtagctgggactacaggtgtgtgccactacacctggctactttttatttttagtagagatgaggtctcgctatgttgcccaggctggtctagaacttctggcctcaagcaatcctcccacctcagctttccaaagtgttggaattagaggcatgagccactgcacccagtcttcatttaatttttagtaataacggtgtttaacaactggctcataaaattcctgaacatttaacaatccactcttgcaagccagtaagaactggatttaacacactagtgcgacagaatggaatctcaggtgggagcctagaagttgaggagttcctctcagagggctcatcctcactctaatgcaggaggtgagatcatcagctgtgtctgaaatagcagtagccttgtgagctccaagcagcaaactctggaggtgtgattgtctccaccagcacacagtgggtcaaggtggggggagaaggtggatggctgcactgattccagttgggtttggtctaatgagtatgactgaagggagtgaggagggatgccccatgcactgtggagagtaaggaggtgagaaaagaagtgaagacagaagagggctgacaggaacacagtaaaagagacaacatcctgtcttgagaaccaaaaacaagagcagtgccagtgaagagtgagacaacgggagggtcgccaatctggactcaggaagttcgatgtcggggctcgagactgcacaggcgctgcacaatgtttgctaacacagcccatcgtggtgatgccagtgggtggctgaagtgcaggggaagcgagggctctgtgggccaggcagtcaagcatctgggagcctggcatggcagttggtttgtcttcatggatactgaggtgacccaggatgatggcaaattcctgccaaattaacagctacatttcccatagttcttccagtctgaaccactgaggagtttccacgtcgtttttgagcaacaaagcaaaattatatgatctgtatttttcctcaccaggaaaaaaaaagatttctccttataaaaatgtgtagattatgtatgatgttccctgttcctttctaatttgaaataataaaccatgaactagctccacaaatctttcttaaacacatttgagctagatccactgagatcacagcaggggaaggaagaacacacggttttcagagaagaaaaggtgaggtgtatgtttcaactgtgtgcaaaaggactctggtgtaggtgatcaaagtaaacttacatggccttagccaagtcataggatattttttcttttctctcttttcttttgtagtgcaactgtggtcactctggtcaaatgtggaagacgctggtgctaacgcttgttctgcagtcagtcatctgtaaaatggtaactatttcacttgccctacacctctctcccatttctatatatctcagatggacataaaacatgctctggaagtgaaaagtagtctatatgatgatcacaattattcactttgacgaactcttagcaagcttttaaaagaggttaaaacatagtatcatctctgtaatccacattacagatagtcatcatgttactgaatcagggctatttgagaaataattagaatctgggaaaactctgaatcctgaaatcaatcaaattaatagaagccccttaatatctgtttaccaaaggcataaggaaagcaaatgaaaagatcatactgtaatcgccaatgaaaaccataaggctctgcataaatgaccctgtgatcaaattactctttcagctgacaaaattaaccttcttaagtacacatgtataaacagggtgtttattgtagtgtaatattaacagtttggcaccaatcatataagataacagtttggctgtcatcatataagaaggtatgccctctacaagtcaccttaaattgatcatctccttatttggcaagtatttcatgcatttagttaagatttaaaaaaatatatacatattatatatggcctactgacactgataagtcccaatgtcagactgagatatataatcctgaatctttagcctacaataaactgctacaatggtgtccaggaagatccttattaaggaagaagagtttggtagtaattagtgttcttcaccaataatctttctcctttttatggaatggtaggatgggccttccctgcccctttttcaatcaggcattggcctgtaacttgccacagtcaataactaagcaaaagtcacacgtaagccgggagtatggtggctcacacctgtaaccccagcactttgggaggccgaggtgggtggatcacctgaggtcaggagttcaagaccagcctggccaacatggcaaagccccgtctctactaaaaatacaaaaaaatgccgggagcggtggctcacacctgtaatctcagcactttgggaggccaaggcgggcggatcacgaggtcaggctttggagaccagcctggccaacatggtgaaaccccgtctctactaaaaatacaaaaattagccaggtgtggtggcgcttgcctgtaatcccagctattcaggaggctgaggcaggagaattgcttgaacccaggaggtggaggttgaagtgagccaagatcgcgccattgcactccagcctgggcaacagagcgagactccgtctcaaaaacaaaacaaaacaattggccggacgtggtggcgggtgcctgtaatcccagctatttgggaagctgaggtaggagaatagcttgaacccaagagatggaggctgcagtgagctgagattgcaccactgcactccagcctgggcaacagaggaagatgccatctcaaaaaaaaaaaaagagtgtcacctctgggaagaagcctttaagaccaatgtgctatttctcatgtttccttgacactcccacggtgaccagctatgttccacatggtggaggctctgtcaacctgggtccctgggtaaggacatggcacagagccccccaccaacttgagatggacacatagcctgagcaagaaataaagctttgcttttgctaagatagaagaaactatttgttactgaagcataacctagtctaatttgactgatacaaagggtgatctagacacaggttccataggcaattataaagttttggtatttgcttggttacaatgtcttgtataatctttcctattgctgctgtaacaaagcacaaacttaatggcttaaaacaacataaatgtatcctcttacagttgtggatttcagaagtctaaaatgggtgagaaggactgcattccttctaggagttctaggggaaaatctgtttccttgccttttctagcttctagggacgacctctacattccctgacttgtggtcccatcttcaaagccagcaggtagcatctgccactctcttcttctctctgcttctgttgtcacatcactttttctcactcttcccctcctaccttccccttctaaggatccatgtgatgacattggggtcacctggataatccaggataccttccccaaagaaaggcctttaacttaatcccatttgcaaaggtaacatattgacaagttcccaggacatgggtagctttgagggggccatcattctgtctaccacagctgccttctgtcaactgaggacagccatgcagagacatagtaaagatcctgtctctaaaacattgtgcagactggcaagatgacaaaaatgctatcaccattgaaaataaactgttctcctgatatgtcacagcaataggaaataaggactctgaaattcactggtcaatttcacattgaaaggaagtagtaaagaattcatatttcactgaggtgaacagtggaatcagagagcctgtatgattgccagttgactaaaattcaggcgaataacaaccttttctcttctcttagattttatatggcaaaaatcgattaattttccaggacagaattctctgtttgttccaaacctactgaacttcaacccacttcacaagataaaaccttagatgacaagtcacttgggagccaatctcagagtgcatcacatctcactaaaccaggtgagtttcacctcttgagaaagaagcaggccttcagtctgtgcctggaggagacatgcttctaccacaagagggagtcttagtccatggataaagagtatcaaagagaaagagagcataaagctttgccagtacagtcagccctcggtatccatgggttccacatctgtgggttcaaccaacctcagatcaaaaatattcggaggaaaaaatagaaaaaaacaaaaatgatacaaataaaaaaatccaatacatataataactatttacgcagcatttacattgtattaggtgttataagtaatctagagattctttaaaatacacaggaggatgtgcataggttatatgcaaatcctatgccatttcttatcaggaactcgaacgtctgcagatttttatatccagaaatgggggatgtcctggaaccaattccccccccatggacaggggaatgactgtgtcatttccagcttaaataaacatcaaggagccacaatttggagtttaagacggtgtaccctgccttccttagcccaagcatgactactgtgatgccgcactacattctgtgactttcactggagaaagtgatgcagctgtcttccgataggaacagcctcacagagtcttcatgggaagaaataagtcattttcagtaacttaaaagctggaagtaacatagagtaggaagaagaatggactctgaaatgatacagattcaaatcacagacttgtcagtttcagtcaagtttcatcttctcaaagccctaatttcttcacctgtaaaactgaaaattatacatctagaatataatctagcttctagagatggcctctgcacttcttggctcgtggtcctatctcaaagccagcaggtagcatctgccactctcttcttctgtctacttctgttgtcacatcactttctcccactcttcccctcctaccttccccttataaggactcatcatgtgattacatggggttaccaggattaaattagaatgaatgtaaagcatatagcacaaggatcggcaggccctaggtgcaaaatattaataaatggtaaccagtagtagtagtaataatagtaatagtaatagtagtagtatggaatcaaagggcctcactgtggcaatatagttcatttaggaagtcatttacctgaaatgaagcaatagtgttaagcattaaaagcttcccataaaacctcaatcatgcctctttctaataatgatttctccactttgagcgtctaatccagagtcctggaagtttgtatagttttgttacaaatgatttgaactacatagatgttggtttatgtcatttacatttatgcagctattcttatcagttctgctagagtaaaggcttcttcatgacaagtaacaccttacactatttctgtggaatgtgtgctattcctcatgtagtgggcaactcaagtttcacagacagaggacacacctagcagttatcaagggtacaatgacatggtataatctgggcaaagaatgattgttgttctgtcatggctaacctagtgaaaaaagcaattataacggaaagcacatgggtaattagagaaatgaatactctggtgttcaggttcaatttacaatacattcctgtgttgtcaagttggaagattaattcatctctataaccttacctggtgtcttgaaaaacaaaagttaggtaaaaccactctttagcatctagacactgatgctagaaaaggatgcttggaatgggagtctgagggaagggcataaatgcccagcccttttctccatttacctcatatttgtttacactaaaggagtaagcgccaccgtatgtgaacagggcaacgctccaggttagatgggccccaaacccaataggctttcttcaaaataacaaaatcaaattccaaggtctctttaaaaaggtctggataaaactgatccttggtataaaaaaacaatcacaccagggattatatctgagtagggtgatgattgggaaggtgcataagaaaacttctggaatgatggagtagtctatatcttgatagaggcatgggttatatgagggtatgcatttttcaaaactcattgagtggtacaaccaagattttcgcattttattgtacatgtatatatattttacaaaaaaaaaaaaaaaaagaaaagaaaaggtgtggaggggtgttcagagtctagaaggtgcagctgtagcaagcttgtagccacaggagcttgggaaaaggtacaaaaatgaaactggcttgcacttcacctggtgagaggagctacctcaagaagtaaacgcacagcagcaacccaggaatctccccacttatcctttcccccaaattcacaagcttggcaagtacgcctggtctctgtgataccttttcttctaagagctcatggtaaggagagagatgctttgtaatcacagtcatcttttcccagcagcactaggagagaagagatgggtggctgatttgggggttgtatagaaatctagttttcaagtgttaactgcagtaagaaccgattgccacccaaacaaagaaccttaaaatctaaatgtaaagaaggaggcttttaagttactctacagtcctggtatatatatgtacaagagcaatgtgcagaaaagaactcgactgtttataacaagttgctgccagaaaagactcctggtgtttgaactcattaaccttgatgccaaaatcgacccactccccccgacaaaaactttagtacctgtctggttttacccacccaacctgtccctctgaaggaggccacaaggaatagaggttgagaaagttgacttctgactttcagaataaacccaggcctcaccagtatctctgtgcttcagtttcttcatctgtaaacggggagaacagaagtatctactcctatgatgatattcaggcttaatctgctccatattaggacaaggtcaggaagcagcaggtgggtgaattaggaaagacacagacacatactgatctccaggttcacaaatggtgacacatccttctctaccccacagcttcacaggcaccctcggcacatatcactagcgaatcaatttcattagtagctggagctcaggaagtaaatgcagagtttaatgcatttctctgatccagaggataatgaactgaattccagaagctcaaagaaaattggaggactgcagtaaacacgtgctttttctcccaagttccttggattagtcatcataacagttaaccaatccattaaggacagaactggaagactctcattcagaccccaagaattctgcctctctgaatgtaaatagagaaatagaggataagtagtaaactacccccattccttctccccagcttctgttcgcaatattctgattcagctgccttttaggggcagtgatgtgtggtactatagtcctccttagtcaggtggactgtcaggacaaaaaatgtctggtagcttgggcatgattctcctctgcttcaggaaaggatgacggcagggtaaagatgtcaggttgccatgcagatttactgcaattaaagtccctaaagtagtctgggcgtggtggctcacacctgtaatcccagccctttgggaggttgaggtaagaagactgcttgaggtcaagagtttgagacaagcctgggcaacatagtgaggccctattcctaccaagccaggcatggtggtgcatgcctgtagtcccagctgtgggaggttgagatggaaggatcacttgagcctgggagttcaaggctgtagtgagccgtgattgtgccactgcactccagcctgggtgacagtgtgagaccctgtctctaaacaatgaacaaacaggtaaataaataaaattcagttttgagaacttcataatctatcactacaacggaaaggagaagtgggcaagggtaacaagggctatctacagggagggtttgtgcaagtgaatggagggtaatgacacatttctcctaccagagtaaaaacacttgtttttccattataaatgcaacaaatgctattgaaagaaagttgaaaaaaatgaaaaaactaaaagaatatttaaaaatccagtgttttggctggacacagtggctcatgcctgtaatcccagtactttgggaggccgaggtgaatggattccttgagcccacggagtttgagaccagcctgagcaacatggcaaaaccctgtctttacaaaaaatacaaaaacattggctgggcttggtggtgtgcacctgtggtcccagctactcaggaggctgaggtgggagaattgctagagcccaggaggtcaaggctgctgtgaactgtgatcacgtcattgtgctccagcatgggtgacagagggagaccctgtctaaaaaagaaaaaaaaaaaaatccagtgtctcatcacccagacacatccctaatatcattttggcagatttccttcaagccctgtagtaacacttctgtgtcattcaaacttcgtgctcctttacaaaatggctgcgtaagatcctgggctaaagattcaccacaatttacttaaccaatcctctagatttggactttcaggttgtctctaatttttcacgtttacaaagaacaactttgtgcacttaatttgcttctttctgtgaattcatatttagaatcgctgccttaggatattttctcagatttggaattactgagtcagctactctgaatgcatattaagtcctttaattcattcaacgtttactgagtgtttactgaatgtttacatagtgcctggcactgtgctcagataaagaagaaaagatgaaaaacacagtcttgatctctgtcttcaagaagttcacagtcagggagaaagcatggtgccaaacttctctttccataggtgattccatcctacagtatgtagtccacattttaccacatcaacactattagtattcatacaaacagaccatacaaaaattgggcttaattagtaggcaggccgggcatggtggctcatacctgtaatgcctctagcactttgggaggcagaggtgggtgaattacttgaggccaggagttcgagaccagcctggccaacagggtgaaaccctgtctctactaaaaatacaaaaactagctgggcgtggtggcacgcacctgtaatcccaactacttgggaggctgaggcatgagaattgctttaatctgggaggcggaggttgcagtgagccgagattgcaccattgcactccagcctgagtgacagagtgagatctgtctcaaaaaaaaaaaaaaaaaaaaaaaattagtaggtaaaaaatgaaaccttgttttaatttgaatttatgtttactgattaattgtacctccccttttatgaatcacttcacgtttttgctcatacgttactgggatgttggtatatttctcattgatttgtatgcttcctttacagagcaaagacatgagcctgccatctgtatgcactactacacctcctagtttacaatttaatctattttttccacacttaaaatgacttccactcatactttggagttatgccatttggcctatattgagaaatgtaataagaaactacccaatgaaaactgttgctttatttactgaaaggatttctctttttttttgaaggcaatgttgattatattagtttcctctttatgagaacccacagaagaaatttctttctgatattcgtatcaaggccaggcacagtggttcatgcctataatcccaacacttttgggaggccaaggtgggtggatcacttgaggccaggagtttgagaccagcctggccaaaatggcgagaccccgtctctaccaaaaatataaaaattagctgggcgtggtggcgcatgcctgtaatcccagctactcagtaggctgaggcgtgagaatcgcttgaacccaggaggtggaggttgcagtgagccgagatcacaccacttccctccagcctgggtgacagagtgagactctgtctggggaaaaaaaaaaacaaaacagtctggtagaggtgtgcagaatagattgctaggagattaaaaaaaaaatggaaccagtaaccctagctatgaggtcagaagttcaaaagtgataagggcttgaattagttaataatttttttaaaaaagatttctaatttcattatattttctttcttttctttttcttttttttttttttttgagacagagattcactcctgttgcccaggctggagggcagtggtgtgatctcagctcactgcaacctccgactcctgggttcaagcaattctcctgccacagcctcccaagtagctgggattacaggcatgcaccaccacacccagctaattttgtatttttagtacagacggggttggtcaggctggtttcgaactcccgacctcaggtgatccacccacctcggcctcccaaagtgctgggattacaggcatcagccactaaggccttcgttatattttctaacaaaaaaaataaggtttctaaacttcattttcttttcttttttttttttttttttttttttttgagacagagtcttgctctgtcacctaggctggaatgcagtggcacgatctcagcttactacaacctccatttcccgggttcaagcaattctcctgcctcagcctcctgagtagtggggattacaggcacccgctaccatggccagctaattttttttttttttgtatttttagtagagatggggtttcaccattttggccaggctggtctcgaactcctggcctcaattgttctgcccgccttggcctcccaaagtgctgggattcaggcatgagccaccatgcccagcctaatttcatcatattttctaactactaataatatgtaggattgttatgaatttttgccaaatgcaatacatttaaactcctgaatttagattaaaaaatatttttttatctatctatctatctatagaccgggttatgagactggttaatttttgtatttttggtagagacggagttttgacatgttgctcaggctggtctcaaactcctgggctcaggtgatccgcccacctcagcctccccaaagtgctggcatgacaggggtgagccactgcacctggctgcttgaatttagatttttaaaagaatttcattatcaccaagtaaacataattttatctcttttttcaaatattaatactccatttcttatttcacttgccagaacagtatttttttttttaattatctacatacaattttaggttagaaaatgagaagtgattcaagggaacaagaaaaagttttggaaattacttaaactcttaaagactttaatattacaaaccagaagcaacatgacaatggtgagaggatgtgctgctgaagacatgtagttggggtagctgggtatccacctggctatcagttcagaaaattagaactgcttcctcccacacagctgcaatcccattcagatgggtcgcagagttccatgttaaaaaaaaaattggaatagcatatttattccagctgtggaaggaagataaacttctgactattgtgaaataaaggatatcatcagagacaaattgaataggtatgaatatataaaaataaaatagttttgcccaatgaaatgtaaaaaagggacagtaatagaggaggaaaatagctgataaacgtttacaagcttatatatatgtatataaatctattacaaatatgaaatatataaggtcaataaccatattccaaggaataaatggtcaaatggtcagaagagtccaatccgtttatacacaaaggaaacagaaatagtaaattgtcatttggaacactgcaaagcctctcatgaaattaaaaaaaaaaatgtaaaaaataccttagggaataattgcatgcttgttaaattaagaaattgataggacataatgtagagaaatgtatccatgtacttacatatttctggtagcattgcaaccaatataagctatttggaaagccttctaataaatgtaacaacagctacatacgcatgcatgcacctgtgcagacacacacactgacctcctagttcacttggaggaaatacatccccacaaaggaacagtgatttgtctattcagagaactactcgtaacagggaaaaatgaaaatgacccaagaacctaaaaaaagaagggctaaacaaactacaggatggcaacatgaggtatcatatagctttttgaaaggacacgtatggggacataaataactagaagtgcaaagggagtatctcaaaccactgctttgcaaaacttccgtgtattatgtgaattaagaaaggtgtagccagagtgaatgttttcctgtactggttttttccttaggttcactgggccttagagagatcagaagcccacctggtactgttcaactgaccacacacctgtgatctccctcctttaatataacatgctccagttggcacctccagcctctaataagtaccatcataggaatatacactctgctttacaacttaggtttctggaaaggaaagcaactgctgagttgtctcatgggcttactgtgagtgtggcgagtgacatgaagccgattaggttattccatactttatcgatgtccttcagcaactgctggagtttctcactgcacactgcagtggcttttatccccagctccacacgcttggttaccctgtacacttcaacaacacctgacgggatgagagagcagagagagagtgttggcagtggagacacagaggacccagacaggggagcattattgcttgctgatatctgtgagaaacaatgggtgtatctggacagaggtgtacttactattctttgggaccaatccacttctcaatgctgctgtatagcttactggtaagagcatagaagctgcactgcttgggttcaaaccccagctatgcctcttactggctacatgaccttaggcaagtcacataatctctctgtacctcagtttcctcatctgtgaagttgggatggtaacagtagctcctccaaggatggttgagaggattaaatagggtaatatggtaaaaggcttacaacagtgcttggagaatggcaggcactatgcaagttattagcttttgttttttgggaggtttatttatgagtccatctgtttgaatctgggaaatcccaataaactagctgaaaatggggatagtaaaaatttaaaagaatctaaatgttaatagcatcacaaagtaatgaagaaacatctcacccctctgaatctgaaggtcttacaaacactttgacttcacttatctttaaacacataacaggatgcagaacagttcttttcctatggtctctaaattgtggttgaactcttgaagcaaggatgagaggtgctaagtacctccacattctaaggacagccaccagacacatccctaacccctgcaatgtaacagtcaccaaagacatgaccccgatctctctaagtgaacactggaggaattccaggggatcttcagagcggggcctcagcagccctgtgtcagcactacggcttttcttcttcctttcccaagagaggggcagaaattactgcccaccctaagccaagtgagggggcttctaagagaatcttccatagatacaaggatactaggagaaaagacaggtgccccatttcctggtggacatctgcttatgcagaactgtgcctgtttgagcaggaaaagaagaccccaagtgaggtggcaggagtaaggcagagactacatcccttcactctccactcatccagcaaatatttttgagtgccaactacgtgcaagacactagattaggtgttggggacacaccagtgaacaaaacagaccaaaatccttgccttcttggaggttcattctagtgaagggagacagagagtaaaaacaacaagtagctaggtgcagtggctcacgcctgtgatcccagcacttcgggaggccaaggtgggtgggtcgcttgagctcaggagttcgagaccagcctgggcaacatggcggaaacctgtctctacaaaaactacaaaaattagctgggtgcatggtggtgcacacctgtggttccagctacttgggaggctgaggtgggatgattgcttgcgcctgggaggtggacgctgcagtgagtcatgactacatcactacactccaacctgggtgacagagtgtgaacctgtcttaaaaaagaaaagaaaagaaaagaataataagtaacatatgtaagaaattaaaggtaatagggctaaggagaaaatccagcagagaatgggatgggaagtaccggggtagggagagacgatactctttggagagatggatgctaggaaagatttcactcagaagctgacatttgagtaaagatttgaaaaagattagggtccagcatgtgtggctctggccacgggccaagcctgagcttggggaagggaggaacaccgaagtggacagagactacactttcccgttggactgacacatcaaattgctgcagatggccaggaggttaaggactctgtggtgtcattaagcggtcgagagaaagaatatagagtatggtaaggaattgatgggagacaagatgattttactttagtgcatcggtagttcagattctttgataaaccagtaacacagatataattttacatttttgctattacgtatataacaaggatgaggaaacttagccatagagactttttaattaagtccaatagtttactgcctgtagcttgagtgtcttacccacaaatacagatgcttcttactgaagtcatatgtaacttgagagatctagcttaaaataattaaagggaaaactgaaaataatgcaaagggccatcattttcaatagtaaaatatgaaagaacatacctaataaatattccatgccttgagctgactgaattacttctgtgcaaacagaactactactgattccatttaaggtatcatttgccttcttaatgacctacaagaaatgaaatcacatcaccttacataactgagaaaagtcattgcaaatcaatttactattagtagaaaacccaaccgaaaagccaggaggtgtcaaaaaatctcattttatccttgaagaaacaatcctccatttctctggaagagaaaatatgtttttttccttttgttttgttttgctttgttttgagacggagtctcgctctgtagcacaggttggagtgcagtggcaagatctcggctcactgaacccctgactcccgggttcaagtgattctcctgcctcagtttcctgagtagctgagattacaggcacgtgccaccacgcctggctaatttttgcatttttagtagagacagggtttcaccatgttggtcaggctggtctcaaactcctgacctcgtgatccgcccgccttggcctcccaaagtgctgggattataggtgttgagccaccgcacccagccaagacaggttctttagcttaaatattattttgatttagtcagagttaatgaaatcactttgttatttcttaaacacaatgacagatgaggggatgactgacacatgagccggtctgctattgtaagtgtgaaagaagcctcaccttagatgcatgacttccacagagttactctttgcccagggacatccaagtaaggctctcctgaagtttgcctctgtcaattcaaatgaaccaagaaggcaaaaaggcacaaaagagcactcacatatgtgtgaacgcgtaagtgacatactcacattcagggcactccccaggcatctctgccattcatatgcatatctctcattttcctgtgaatttgttaaaaagaactgggttaaacacacaaacctggaatcttctattgatgactctgtcaattcaaagtgcttggaggactttcctttttattacgatcactctagttcaagcagtttatgttttttttgtttttgtttttgttttgagatagggtcttgctctgttgcccaggctgaagtgcagtggcatgatttctgctcactgcactggacgcaagcaatcctcccacctcagcctccagagcagctgggactacaggcacgcaccaccacatgaggctaatttttgtatttttggtagaggtggggtttcaccatgttgctcaggcttgtcttgaactcctgagctcgagtgatctgcccgacttggccttccaaagtgctgagattacaggcatgagccaccatgcccagccgcagtttatctttttgaactcactaataactatgttaaattactaataaatgtaacttctgagcacaggacctgtgagtctaagggacatgctttccagcagcttccccctgtgagtgttgcctcatttgttccatcagtaacagtgtaagcctttcttcggaggcactcagcatgtagctatctggtacagaaactgctattaagccactggctttccacgccccagttataacgctgtgtggctgtgtgtgaggacgtggcccatgtgcacatgtaacaaggagtagggaaaggtgggaaattaagtgtgttgaccataggaggaacatagcgtggcactaagatgcagcagacagaaataaaaaattcagaatattttccctgtctcctctattttgaggtttcatgaagacaataaagtctaagtgctcaagaagaattatacaaacactgccatccttgtgaagtcccatgaatagttttggttttagggtcactgattagtttcagtgggtgccacacctgggaaatgttttcacccagggctaatgttacccttgcctcactttaattacatagtttatgtctggtgctttgtgtctttctgcccctcattttccccatgtgaaagctgacagcattctttcttggggccctgtgtgcttgctggtctgttacccaccccttgtagaaagctctcctctcacctccacctctcccgtcaggtctttgtacttgtctcggatgacgggcagggcgggcttctcattcagagtattggaacggtctctgaaaggctgctccaaagctggagaaggagaagaacggcttatttctttatcaccaaggctcaaactcctcttgtgtgatcctgggagaaggggataatacagtcaaaggttttggctactcaccttagttcaggcagaggctcttcctcgctaccacaaccctcttcttttttttttttttttttttttgagacagattcttgctctgtcgctcagactggagtacggtggtgtgatctcggctcagtgcaacctccgcctcctgggttcaagcaattctcctgcctcagcctcctgagtagctgggactacaggtgcacaccatcatgcctggctaatttttgtatttttagtagatacacggtttcattgtgttggccaggctggtctcgaactcctgatctcaagttatctgcctgcctcccctcccaaagcgttgagattacaggtgtgagccaccgcgcccagcccacgaccctcttcttcagatgcttatgtcatgaggcattcacaaacacattcctcattcattctttctgggaagctacatgttaaatcttttctactgttctctcttgcacggtttccctgcgtttcgttttcaacatgactcttctctgatctatcacaagtcttccataatgcccagtgcagaatcactggagtctggagaacaaaagcacctttctaaatatcagtatgtaagagttgtgtggcttttccagtcatttgttatggatttgtaaccgagttccttcacagtctctcaatccagttgaaatcaacgacccctcctgtcaggatgagattaaagcagaagaggcaaactcaaatgccttcagagaccaggcaagtaaagtgaacaacttaagtaggtccgctgagacaggaagcggtggggattatggtaggagagagagaatgacccacctacagggagtggtgctcttcggctccagctgccaacatatgggactgtagacctactagtgccagatattatgacttctcaagaaaagttggaaatccagattgggaaatctcatgtcttttaaatactggcaattacttcgtacttaaaaatcttttgtgtgggtcaatgtgatatgcaggctagatgcagatccccggcccccactttgcaacctttggattaaaagacattatctgtgctcagggaacatgagcggagctaatgtgcctacaagtggctcgaatccatttatctggctcttttaacacagcacacctctaaccaaacgagctaatgagcaatacctgcatgctgtgcttgtttttagcccataaagcagttatctgagggatgctgattttgactcccgtctcagggaaatctttattatagctatctgtaattgaccctgatttcaaagattagaacaatctatttcctgcgaaaccagagagcaacattttattcttaagaacatctaacatctcagtggaaaaaaaccacaatagtaaaatctaccttggaagctactcaccttgaacagaaaggtcaaaggttgccagctcacttttgatcatttcttcactggatttcattttgctttgtgaagtggctactaagaagtcaaatttgctgattttgggcttttcactttgaaactctccaaagtcatccgaacattcgttcggggtttcttgagaggcaccactggacgctgggctgggacacgtggcctcctggctccgttcagccgtaggcaggtcctgttttgtgaaatctttatagtctctgttttcatattccttttgctcactggtctgaggaatcgtgtctttaaaactggcaagagctgggaaggtggtctctggaagagcatcttcacttacaaaggtcgttactttggagagagatgtcatggtgatgttttcagaactgccaaatgaagtctctttcttttgaagaattgaggtggctgagggggatccacttcctgctgagaggacaaatggagagagttttctgccctgagttgcatcatccctgtctgaccagtcatagcttgtaagtgtgctcactgcaaaattgctactgtagcttccaaaagcagcatattttaagtcctctatatctgaaagggaaataagaccccacaattagaggcaagcaatttaggcaaaatgccctaaactctgtagaagcaaaatgcctagcatatttgattagttttatactatgttgaaattagctaaatttagagtttgtactaaaattaagagttgggctgtaaaatctgatcttaaaaaaacccacattagccttgagttggcatttacatttagttaccaagaaccattttctttggctataaaaattactaaaaaaagataggaggttcatctaccaaagtatacactgtttgatataagattagggtcatttaataaattgttcccttatcaacttaaaaatgtactgatattccttgcctaaaacatgtctcccttcatcttgactttgttggaaaatgtgcctttaaaacatggtcatgtgaaatgcacatggcaaaataattaaaagttgacagtttctcaaaactaaaatgaaaataatgtcatctaacttttaatcaattattagggtttctgtcataatattatcaattattagaatttctgtctcaggcaatgccaaacatgagattttaatcaagcaattacttacctagttgttattttggtcaaattggacgtcatattgctgtgatgaagtatgaggaaagaaaatcaatctgatctactttagcccttaaaaaaatacaataaaaagatctgggtcctgttgggctccactttttccttcaactatgtatctactccccattttttaaaaaaaaaggaaagaagaaaaagaaagaactgctggggcagacgactgattttacaaagcattcttaatatatagttaagtaatttaagaggtagcataaaacagcataaagaatgtaggtttttgatttggaaagacctgagttcaaccttgctacctactatttgtatgacactaggctaatgattgaacatttctgaacctcagtttgcttatcagtaaaatgaggagaggagaagaccatgtacttggaaggactgtgttatgaccatcaaccatgatcatgtgtgtaaaaggccaggttggtgcctggtgagcaatacataatagctagtgtctgctcagcataggtgccaccagcctcaacttgacagttaattgctgctttagggcctacagtggaatttcaaagcaaaaatgaaaagtcaactcagcattttagtggtgttactaggagaaaattttcttgctcattttcagaaagcaaaaccagccgagactgaatttggctggtgtggagaagtgggttgatatgcatttcgtttcattgtagtcactgtacatgaggcaagaaggccaaatatgagactctccctctgacaaccacatatgtgatttacaaggaaagtgctcaaaagttttatgacctagattttcagaactaagtcaataagtgaaccaacttggagtcattcttctctttcattcacagcaatactgcataatttatgaggggtaagaagctcctgacatttccatagctcttctaatggtataatccaaatctctctttctttgagctgttaggaaaggggtgctaagtgaataataaaaacaaaaaacactagttgtacaaaaaaccaaccagcaaaaagcaaacagctttcacagaatgatggcatatttaaaaattctgtggtgcaatggtacccttcaaatgtggtttataaaacagaaggaaaaaacgactcaggtgaaaagtttttttttttttttaattgattttttgagatggagtttcactcttgtcacccagcctggagtgcaatggcgcgatctcggctcactacaacctccgcctcctgggttcaagcgattctccggtctcagcctctcgattagttgggattacaggcagccgccaccacgcctggctagtttttgtattttgagtagagacggggtttcaccatgttggccaggctggtcttgaactcctgacttcaggtgatccgcccgtctcggcctcccaaagtgctggaattacaggcatgagccattgtgcctggcctcaggtgaaaaatttatagtttagaatgaatggaaaagcctttagcccaaagctttcttggtttttgctgtagtgattttttgttttcgtttttttccccacgatttaaagggaccagaaggtgtccagactcaaatgaggtgaaattcagtcaggggatgatgcagttaaatacaggactattcttggagagatacattcagaaaaatgtttcataatacagatatttctattactaggcccgacgaaagcgttttgggaaactatattaggaactgcttccagaatctttcctattaaaaggttagcaggctgggcatggtggctcacagcactttgggaggcctgtaatcccagcactttgggaggctggggcaggtggatcaccagagtttaggagttcgagaccagcctgaccaacatggagaaaccctgtctctactaaaaatacaaaattagctgggcatggtggtgcatgcctgtaattccagctactcaggaggctgaggtaggagaatcacttaaacccagcaagcagaggttgcagtgagctgagattgcaccattgcactccagcctgggcaacaagagcgaaactccgtctcaaaaaaaaaaaataataataataataattagctgggcgtggtggcacgtgcctgtaattgcagctactcgggagggtgaggcaggagaatcgcttgaataagggaatcggagattgcagtaagccaagatggcaccactgcactccagcctggcgacagtttgagactctgtctcaaaaaaaggagacaattttcctagaagcaaatgataaatttaatgaaaagatagctccagttcaaacactgcaatcaagatattactatggtaataaaaagatctttctgtgcaattatgcaacaagaaaatgtcttttgaaaaactaaaatgactaatataatcaggtaaaaggcattacagggaataagggattgcctaagctgaggcatttttaagcatttttaaaatttcaggaaatcttatttttgttaaaaatgatacgcctgtaacatcttgccttttggagcaactcccagaaaagactaaatgaaagactaggaaagcaaatgaaagacttagaaatattttatacttaaaatgaagagcaaatatacaagagtcactaaaatcaagcctcaaaattgagttttaaatttacttttgcttatttgttggctattatagtgtgaaaaagtaatttcgtaaagtgtaattcatttgaacaccagtactgatggtacataaggaatgtgagacagaacaccgtgcccctaaacttagaatttataaacaatataattacagggcagtatgttctggcatagcaaatatacgtcaaccattaactaagaaaaatgtggtacatcagttcattgaaggtagcttaaagtaagaaaattcttcatttcccctgttaatagttctacatttctaagcagtccacttatcggtattattgtataatggtcttaaaaatattaaagattatgtaagacctacaacataaatgatagaaaaaatgatgtggaataacccacattttagtttgtaatcactgaagctagtatagatggattttcaatttgatagccgaattctgaaaattgcaagagaaaaaggaaaaagaaaatggagaatgaatgcaataaaatgaacagaaaatcactactgtatttccagttctgctgcaaaactcctaggctgtgctaggctgactgcatttgcacacagataatatgccaaattgttgttttaatgcatacatctgtttgcaatcagggatgtcctattacaaaggccaaagaaataaatgtatacgatctgttttccatcatggatctcaaatcaaaacacatatttcttgcttatgctggcaagtaaccctatcagtctcttccataacctctattcaaatctcttttgaatagatgttgtacatgaaaacggtattttttggaacaaagaatgttggctgctactacaggacacagacggccaagctcattcccagggacatttgctaaagctgttaagtatatgcccaggtgaggaagagttactggcttttgaaggagtttggagaaagaagaaaggagatatatgtacaaattccactattctcattttatatagcaataaaaatgttcattggactaagatatatattttaatttacagtactcatgtaatctaaacttcatttactaaagcaaaccataaaatacttgtacatttcagtttctctctaccctgggccctaatctcccttagtccctattctatctttgatctacctatgagatcagtcatattcatattctctattaactaaaaaacctggtctgtgtcctataagtctcaaacactgaagaaaacaggaatgaaagtgatcacagtataagtgacaggctgaaaaatgctgctgtttaattgccttccagtgttttctaatctgtatgaaaatttcttgttcttcatttgtactgactcacacaacttcatggtataaattatatccacactatctagaagcacctttgggtttctgtgttagtgttttaagttcaaaaaagaaaactggaaatcctgtggatattttaagttagaggaagacagaaggccaaggaatggtgtcaggatacacagtgggactgcccctggtcatcagtaaaaatctcaccaaaaagacaccaaatgaacacagaaggcaggaagtgcaattgaggccttttggttctttgcattattttaggatttagcacaggttttttgatattgccagtgttcccttcatgttcatttgctgctttttttttttttttggagatggagtctcgctctgtcgcctaggctgcagtgtgagtggcacaatctcagctcactgcaacctccacctcacaggttcaagcaattctcgtgcctcagccccccgagtagctgggattacaggcacgagccaccacacctggctaatttttgtatttttagtagagatggggtttcaccatgttggccaggctggtctccaactcctgacctcaggtgatccgcctgccttcgcctcccaaagtgctgggattacaggcgtgagccactgtgcctggccgtcatttgctacttctaaaaatcagcagggattctgatgtgaacaacagagtgactatagaacaacagatacataggtatactttctcaggcactgatacatgaagtgaagcactaaccatatgttacttggcatcagggtaaacaaaacagtattttgtttaaacctatagcatagaattcttcaagtctttttcgcaaaagaagtttaagtcattacattatattaaaactacctccctaaaaagtaatgttactttggaaatactcattactcaatttgtgaatgtatgctttacacacagttacattcagtcattttctgcagcctgctcagataaatgcagaaaagagttaaaataaagcagtcctacatggaccaatctagcattacagaattccactgacaaagaaattcctcagtcaaagccatcaagagattggttttataaatagcacgggaaaatccaaaataaagggcagctggcattatcactagatggaagctacactaagatctctttctttcaaatttgttaggaagcacatatcataaataaaatataatgcatttacacaaggtttttgaaaccaagtattattcaactttttaaagcagtatgctctggaaagtgctgtattttgaatggcaggcctggcttttctcagagttaacctaaacctctatatgcaacttttctttcttaaatggcatatttaagacactacaagtgatctcttaggagtcctattcaaaatcctcatcttcttctaggccgggtgtggtggctcacacctgtaatcccactactttgggaggccgaggcaggtggatcacctgaggtcaggagtttgacaccagcctggccaacatggtgaaaacccacttctactaaaaatacaaaaattagctgggcgtggtggcaggcacctggaatcccagttacttgggaggctgaggcaggagagtcacttgaacctcagaggcagaggttgcagtgagccgagatccaagattgcgccattccactccagcctgggtgacaagagggaaactctgtcttaaaaaaaaaaaaaaaaaacacacaaaaaaacgggcgtggtggctcatgcctgtaatcccagcactttgggaggccaaggcgggcggattacctgaggtcaggagttcgagaccagcctgaccaacatggagaaacccccatctctattaaaaatacaaaattagctgggtgtgttggcatgtgcctgtaatcccagctactcaggaggccgaggcaggagaatcacttgaacctgggagacagaggttgcagtgagctgagattgtgccattgcactccagcctgggcaacaagaaacctggtctcaaaaaaaaaaaaaaaaaaagtcctcatcttcagtgatttaatttccttccttcctcaaattctaaaaaagaacaaagaattaaagcctcaaaacataagaatacaaaatgtaaaccatggaaatatcccctttcccagggattttattgctttggggtttctaacctgaaaaacagtaatattctcaaggtttttttactgttaccatactctaaaatggagaaaatattttccatgtttggcctacgcttgttgccacatttcattggtccttctagaaaatgttttcttaaaaataagaatggttcaaaccttactttgttagacacaccccctaaagtaacatgttttaagaatttgctttatgtactatgagtgaaaaaaaaaggctgagggttgcttcatcatacagaacacatactgcaaacctaacatgctctgcaattagaggatggagtacccaatttttctttctttgagactaggtcttgctctgtcacccaggctggagtgcagtgatgtgatcacagctcactgcagcctctacctcccaggatcaactgatcctcacactttagcctcctgagtagctgggactacaggagcccaccaccgtgcccggctaatttttgtattttttggtaaagatggggttttgccatgttgcctaggctggtcatgaactactagcctcaagcaatccacccaccttggcctcccaaagtgctggtactacaggtgtgagccaccgtgcccggatgagtacccaatttcaaactcaaatcaaattccatcctcaagacttcctgctattaatacagaacactttccattatgcagattatcaatttaaatacagtttacatttactgtgctcagaagtccatttcaatattatttgatgatatatatctaataactagttattacataactagatagttatagttaactctttccacaacactcaactcttaggtctttttccccaccttccccttctcttctcttcaatgtaatgcctagtagagacagattctctacaataaaatatgatcagtttcttcaagagaagaaactgcaataaatgttctttctccctatcatgtaaagtagtgtaaggtttattcttatttaagtttaattttctatttcaatccaatgccatgttaaaaacttacattaatggaattataagaaacaaaggctaaaatgtaccaatactttctcaggagacaagtgtttgacgaaacaaaacaaaaggggaaaaccctctagtcttaggatactattgctttaaacttggtatcagccaggtatttctttggtctaaccctgaaaaagtacaaattacacacatccccacactttcaaaatatgccaaagaattatttattaacacaagacttacagatcacaaaagagagtgatacagaagagctggaaaagaagtcatcagaataagcatgcagatcagtatttgcagaggaatatactaaagtaaatttgaaggcacattcacacagaaaatgtctaaattgaaaaaaagacatcagaaaagcagccaaaaaaaaaaaaaggtgctaattaaaatacaaagattttcaatgtcaaagaagagctactttacagataggtaggtaggtagctacagaagtcttgctaaccctttgaaaatgtcacagatgagggtcagctcttgctgccaataaaaccatatgattttaatgactgcacgtcaagatgcttcagtgccgcagattaaatttagtcagggggaaaaaacagcctagttgaaattatatgcagcaaggcctcaaagggttaaatgtaataatacgcagagaaatcaggcaatgttatcagtattatctaccttccatacaaatgattatagcaagagttaaaagagacagtatccccttcagagttaagttagggcttctaaacaggattaaggtccgcagatagcaatctaccaggttttattctctcttcatcagctcacttcttatttctccaacaagaagtacctttaaccctcaaactaagagagcaagagatactgtggtgaacatgaggataaaataaaactacattactttgaataagtccttgccatttaccctctacaatacattgatgcagcaattttgcacaacagcaatatagcgcattggtcagacatcaaccccttttaacaaccgctctaaagggatactgctcctttctgacaggaggtttacagatcaatgggaggaaacaatctgcttttaagaatatcctccaactgaagagttagcttgaacattacaggctccaagctgaggatgttccaaacatacataaaagaacatgagcacagaagattattttaacaggtcagtaagaacaagcttggtcaaaaaaaccaacctccaaataaaatgggggaaaaaaaaagacaccccaaacccggattagcctcatttcataaagacatctaccttggcactgtgaaagaatatagattcactttcagaaaaatagtttctaattaataacttcagagtccaaaaggctagtatacatgttatgagatttttaaataaaaatccaatattgttcagaaaacagagcactttgcaaccaactgctgtggttcaagcagctcataaaaaaaaaaaaccaacaaaacaaaacccacaatcactctatcaaacaaacagcagcaaaaaaataagaaaatttctgaggaaaagtacaaaaaaaaaaaaaaagacagaaagtagacagtcaagggcacaggagctcttcagaccgcccactgcatttgaaaaataccttagcaagtagcaacatgaaacatgcaatgtctctgctaacttgctcctgattcagcagcctgtttagcaatacctacaacatttccataaccaaaggatggatgcaattttgttttccgacttgccaatttgacatatgcaaaagctataggactttacaatttctgcctgaatctgtaaacttggaagtgtctcacgtgtcccccctagttagacaaaaccaaatccttcatatgcataatacattttctagaataatacagtgatactgagatatttctcattattaaaaggccacaaaataggtttatctttctatatacatatcaaaaaacaaaacaaaagaaaaaccaggacacttgggaatctagtttttatgacagaagttgaactagagagtaaattgctacatgtaaatctacacagaatttaaagagggctccctaataagatgttttcaaacattttatcagaaagttagcagttaccctatcctagcatctacagatttgttacaacttaatatttccagtaatagagttaacactgaaaacagctcctggattccactgacaacacacaccctcctctttgccaggccctgacatacagaacattcatatataaactctttccctcttcttctcttaaaaggatgtggcaaactgcactacaagtggttagaaatttttactttcttgacctaacaagagttaatttctgtaaatcaaacagaatactatactggcagttgctgtgtatacccaagagaagaaaaaaggagagggaaacactgattttactcacagaaatgaaggaacactgccggcactgcaaaggtctttatcaaatttctggcaatgtgaggttcacttagcagtgactttttatgtgcctctaacaccaagctggtgctagatttcaaaaataaaaatatcttagctacccaatctaagttccacagtagccatagtatccatatcaagtatccatagaatcaaatttaacactgctttaaggagactggcaataaagaggttgattattagagattcataaagctaaagggccagagccttactcatgtaaatcaacacccgcagaatcatctttgaaatctacaacaccatcaccagagcaatctcaccaattcctcacctgcagcaggaggatgctggccactaactgttggtaaatccaaagagctatcagacatgacatgcttaagatctcctcccacatcagccaatttcatgtcaaactgaacagagagtgcatcttcagagtcctccttgccaacactgctgccaccaatggaagggagatctaaggacttcactgatgcagagtcttctttggtgtgtctgaaagccactgctttctctcccagggatttgtccgagtttatggaagaaaatttactggagtggaagtcagcaaaatcatcatcactttttcctgaaggagtgttatctttcaggtcttcaacacctagtccagacccttccagagaaagttgtctgaagacatcgtacttggtagacgcagcagtcgagttttgtccacccttcactgtgctgcccacgttgctggttagaggaacaggactggcttcctctttaagggcatcatatttgtcatccggcttttgctcagatgaaatagagctattactgaaagccataaaatctgcaaagtcatcctgctccccaacaggtgctagaccagaatattccccaaaaaggctgaattctccaaaatcatcagccaaactagaagtttttgttgctgccaatgctgtcatagtagcagcagaacctgttgactgtggtgtagaaactgattttgatgtgctaaacacagctgaaaaagacaatggtttctcgctgctgcaattaactgaggaaaacatatctaggtctgctaagttcagagggtttttcacttgtgtttgttgtttctgttgtatagttcctgaggggaaggatggtggaaaagttttgtcttttgttggtggctctagtggtgatacactatcggctgttttaaaatcggtgaaaccatcatcagttcctgcagatctgaattctgcaaagctttctcctgaaagaaaaaataccaccaaacaaatgggaatgctgaactgaaaaccatataatacacagtatattaaactgcaagcataattttactgacttttctccactgacttgacattacttaataatgtttacatactttaaaccctatcgaactacacatttatttccacactgaagtctagtgatactgaaataaatagaaatcgaactgaaagtacctgacggtaccattttcatttgctcatgcttttagtgtgggatctctcttagctctagatcctacaactggctaaaagtactcctctcaagactttttgttcccacagctagccagccaagcagacaatacaataagaaatagggctagaggttcttgaagagaggcatattaaaacagtggccctttaaagataaacatgttacccattaaaaaaatcagaggtaccaataaagtattatgaaaaatcctacatctaatattcaggatgtacaacacttggtttagccaggcactttaagaataacattagatactatgtggtcttgctcaagtaaatgaaggcattaatttgaagggaactttgatgaaaatttttgaaaaggtatctatttatttgcaaagcattctaggtggggcacattgtaaagcagctcctccctatagtctctaataagctgaatctcacagaaaaaaagtccttgagcacttgagcttttctagaaatcagctgtctcactgtatcaatgagcacttatttttatttattaaaattcaaaaggatttgaataaataccaactctattatataaagttttagagggtatgacttagactttagtttacattatgctactctgaggatggggtaactgacggaattgtttatttatttatttattttttaaataaaatttcttttgcccatgacacagctctcaagagatcctgagaaacatgtgtctcagatttgtttatttttatattctggttaaatagagtgggtacttatgtacttctcataaataattaaacagactcagttaagacattgataaaaatttaggcctatgattcttttttttttgagacagagtttcattattgtcgcccaggctggagtacaatggtgtgatctcagttcactgcaacctccacctcccaggttcaagcgattctcctgcctcagcctcccaagtagctgggattacaggcacctgccaccacgcccggctaatttttgtatttttagtagagacggggtttcaccacgtcacgtaggctggttttgaactcctgacctcggctgatccacctgcctcggcctcccaaagtgctgggattacaggcgtgagctacagcacccggcccaaggcctgtgattcttaaaaggtttctatattctttattatcatagtaatgttatcatcactcaggtacagcatcaggatacagatgatctcagttttctaatagcatctgaaggtctaccataaaatccactaggctataccaggtaataaaaaccagagataaaccaaatgtaaatatagttatgccaaggccgaacacagtggctcacacctgtaatcccagcactttggaagaccaaggagggtgtatcacttgaggccaggaggagttcaagacaagcctggccaacatggagaaatcccatctctacttaaaatacagaaaaattagctgggcatggaggcacatgcctgtaatcccagctactcgggaggctgaggcacaagaattgtttgaacctgggaggcggagcttgcagtgagccaagatcccaccgctgcactccagcctgggggacagagagagattctgtctcaaaaataaaaataaaaaaacaaataaatatagctataccaaccaacatcatttattattttaaaaaatgactgccatttctggagattaaaattaagtaaattaaaatataagctttaatttcctcacccatttttaaaaattacattttcccctaaaaatgacatataagagcatatcaataataaaaatgtattgagaaccaaaatccaattcttaaattggcatataaaataatgcaggcttaaaatatactgtgcttgggccaggcacggtggctcacgactgtaatccctgcactttggaaggccaaggcgggtgggtcacctgaggtctggagtttgagaccagcctggccaacatagtgaaaccccatctctactaaaaatacaaaaaattagctgggtgtggtggcaggtgcctgtaatcctagctacttgggaggctgaggcaggagaatcgcttgaaccctggagacagaggttgcagtgagccgagattgtgccattgcactccagcctgggcaacaagagcaaaactccgtatcaaaataaataaataaataaaataaaaataaaaataaatttaaaaaataaaatatactgtgcttgtaacaagatatgtacttggatatagcagatgaaaaaaaaaaagcaccaaaaacaatacaagctaatttttcctcctaacctgagatagttaaccaattcaccagcataattcatcaacaccaaggaattcatctaataagagaggaacagcattcagatttcctgtaatttatatttgtaagacataccactagtaaaactcaagtcaatttcacaaactgacagaagatgtaaaacttttaaaaatcaccctagaattttagattagtagtatcactgattatacttgtattatttctgaaaatgtagaggtgataagcggccatttttatcacagcctaaatttttaatgtgttgctttgaaatatctgtgaaattgacaagtattgctttgtttgtttgtttgttttaatcaccacagcaaactacacttactgatgaattgtaaacttttccattggaaatgtaagctgggtgaaagggctaaaaggaaataaaagcgggtgagtttacaaagggaatttgttggcaaataaattagtcacagtcaatggaagcttgtctatcagaaggcatattaagcatattatttcatggttagatttttggttaatgtctacatacttgtaagtttccctctccgtcactttttagactccaaaaaatctcaaaagggaccacttttttgctaaaatttcaataaaaatgtgtcatttctttatacagaacatttcctcatttactttaatttatggcttaaactctggagatggaaaaaaggaaacattattaaactctgtcattcagtaacctaagaaacccacagctctgaacaacacaatactataagattcttcataaattctaagatactaacgtactttgacgaagtcaagccaatgtattttttgagtataaaaaatatatcacaccatttaggaaaataaaatctattctcctaaaatgaacaaagttggcaactctacttggaaaaccttagaattaaagttaagataggaatgaaagcaagtaaatgaaaataacaacaatctggaactttgtttaaaaagtactgaaatgtggctggccatggtggctcacacttgtaatcccagcattttgggaggctgagctggaaagattgcttgaggccaggagttcaagactagcctgggcaacacagcaagaccccactgtggtgatgcacatctacagtaccagccacttgggacggaggctgaggctgcttgagtccaggagttggaagctgctgtgagctatgactgcgccactgcactccaggctggatgacagagcaatacactgtctctcagaaaaaaaaaaaggtattgaaaaggcaggactaaggtactgcttacattttggtgacaccactgtcttttcctattgtctattacgggaatacacattatggtcattaataccatattacacaagaatcctcatgttaaaccatgtgctctttactccaaacttatcttggcccaagtgttgatgaaagcattgctaggtgtaaataaaaacctaacaagtcaaaagatcccctcaggtttatctctgttactcccactgtgtatctgatacaggcactgaggaagaaatggctattacattctaaaagcttggataaaacacaagaaaatatttctagaacctaacagttatatggggctgaatattcttataagaggtgggctttccttctttaaagatgattaagcaatacagtttctaccatacctacctaccttctctcccctacccctagcagaagagtagaaataaaagattgctgaaggatgtcccaagtttgagcattcaatacgtaaagatagaatgtggtattgttcccagaaggaaattctcattagagtatacacatttcatagcatgcatagttaagctttgcagaacataatttgacctatgggttatctaaaccctacccatcatgtttacagtaggatttaaccacaaacataactttcagtttttacatatatgactcccaaatgatcattttatattcccttgtactctaagtcttactatcggagatggtaaccacatgggcacataaatccctctctcttcatctttctcattaaattatagccaatcttgaaaatcttgtaaagtggtgattgagtttaacacaagcaaagtatagtaactgatcactcattcttactggattagtgcgcagatgattgaacactggcgtcttgacgtctgtatccttgaacatactaagtgagcattgtttggttactgcttctgtttgaaatgatcctgtgtcttggttgtggcccgagctttgaactgctacttgccattccctttccttcacagagctctcaccattctaacatgaaggatttggtaaaatacgagttcggttgagtcctgcttactcccacttggtcatctttgtaggaatccaatgtttcattggtttgtttttaaattatttttagctgatgttcatgaagaaaagtgagtacctataaccatgctactaatgaaggaaaatcctagctaagaaggtatatttctgtatgagagctgtgtcctaccatcctttgggctctctgctggaagagtagaatcaaatcttatataatgcctttttaattgtacgctctagtattatagatgtaagacagtactgtaatacacctctgtgaatgtatcttgtacctgctttgtgatatgtagcagtgactatgccttaatcaagtcatttttaataatgttattctagaatattttctttctagatcatgagtgaaaggctaaaaaaaaccaaataataatggtaccaagtaccgcaacaacaatagaaaaaaaaatcttgaaaagaaaaagactggccaagtgtggtggctcacgcctgtaatcccagcactgtgggaggccgaggcgggcagatcacctgaggtcaggagtttcagaccagcctggccaacatggtgaaaccccgtttctactaaaaatatgaaaattagtcaggcatggtggcaggtacctgtaacaccagctacttgagagtctgagaaagaagaatcgcttgaacccaagaggtggaggttgcagtgagccaagatcatgccattgcactctagcctggttgacaaaaataaaactctgtttcaaaaaaaaaagactagttgctgcctttacagtccgcagattgctgtactgctaatacttcaagcagtgtagtttgagtattagcagtacattgttgagcagtgtaataaatcagagtaaccatggctctcatttgacaagggaatttaacttgtcatgcaagcttcccgtgaaagggaatgtcctatcttcagaggaaactacactgatttggaatttgccctgaattttattttatttttactgtgaccaggctggggtacagtggcacaatcatggctcattgcagcctcgacctcccaggctcaagcaatcctcccacctcagcctctggaatagctggggccacaggtgtgcaccaccatatctggcttattttttatttatttattttcattttttgtagagacaaggtctcactatgttgcccaggctggtctcaaactcctgggctcaagccatcctcccactctggcctcccaaagtgctggaattacgggcatgagccactgtgcctggtatgccctaaattttagaaaataaataattctcaatagctgaagcacatttacctccttgtaatctccagaaccataagaagtaatcttatcccccttctactagataatcccccattcagcacctatcatttttttttttttttgagatggaatcttgctgtgttgcccaggctggagtgcagtggcatgatcttggttcactgcaacctctgcctccctgagttcaagcgattcttgtgcctcaacctcctgagcagctgggactacaggcatgtgctaccatgcctggctaacttttttgtatttttagtagcgatggggtcttaccatgttggccaggcttgtctggaactcctgacctcaggtgatccgcccacatcggcctcccaaagtgctgggaatacaggtgtgagctactgtgcccgaccctatcatgatattttttaaaaacaatagctattttttttttttttttgagatggagtcttgctctgtcacccagactggagtgcagtggcacaatctcagctcactgcaacctctgcctgggttcaagcgattctcttgcctcagcctcccgagtacccgggactacaggtgcgcaccatcacacccggctaattttcatatttttagtaaagacagggttttgccacgttggccaggctggtctcaaactcctgacctcaggtgatccaccctccttggccttccaaactgctgggattacaggcgtgagccactgcacccagcctaaacacggttgctattattaaggttttttgaattagaatacttatagtttgagtatctattataaacatcactactataccatattgttttgtccattcagtttttttctcctaaacacacagacacacacacactaaaataaagggaatgccactgaaagaaccatcgaaaaccccttttttattaaaaatggaaataatttatccttttgaggactcaaaaacttacctaaaggtttattctctgctgtctgttcaagttctctgaaagcactatatttatcaccaggatctatgatagaaaggacagaagctcagttaaggttaggaatcttgaaatcacagctccaggaagtgaggcagattggtttaaccaaacactattaacatgtggtatacaggcattttacatatttagcacagaagaccaccacttaaagattcatacaatttaaatagtatgcaatttagcattcacaagtttatgaatttaccaactttttacctccaggtggaacagtattttcagaggacttgtcagctgcaattcctttaaacacagcatatttgtccattgaaggcaatgctttagttccaggaagtggcatcaacaaagaaggggcactgaaggaaaaaataaacatattttgatgacattgaatccctcctttatcatctaaaaggaagttagaattaaaatggcaaacaggtatttcattaaaactcatggctctctgctttaaaagttagaaaactatatagtatacatatataccacaaataaaaaaaaaaccatgtcctttttcaaaaaacaaaacaaaacaaaaaacattacccaaacaatcatttttttcttgattaaatgaagaggggtcagatccatgctgactgtctaaccatctctttaagccgtaataacaactggaatggcgttggaagtagattattaaagaatgatgacttcctgcaattttaacttaaggtccataaaactgcaaaagtgaactgttccacatatgtatactcaatattttaaaataaatcatgttaaccttaatataaattattaacttcaatgggttcagagtgcagaggtagaatagttgagataaaaatctatttatgaaatgctgttcaagccaaaatgtaaattgtttttcttctgattgtactgcactgcctactggcagaagtgcatacatctgataagctgccatagagttaatacaatttgcatttttacaaagatcacatcagcggttctagaagctatctttgtaacaaaacaacaatcacttcaaaattagataaagatacttttgcctgtggacatatttcgtgctggatggaaaaatagcgtaatgagtagcatctgtgcaggtaattcttagaaggcttaaacacatactataaaagcattactttttcttcttcttcttcttcttcttctcttatcagacccaggcagctccctggaagaaccacctttacatatgaatgactacattccaccactagtttgtgtcattcaataccatgcacaagttatataaatggatttctattgagttcttcgccctggagcaaaaatctttccacagtcatttaaaccttcttatcagtggcttacaagcaaggtaaaaactaggctctggtagctgcatgctaatggggtacacagtcctttagggcttaatgccatcaaatattatgatttcacgtcaccaccaaacagctgctacataactgatcttgacaaatgaaataagtcatcacctatacattgtaagtggactttttaaaagttccataagtaattaaagtacagttcactgtacagaatgttacatgggaataaaggaaattaacatcttagggaaaaaaaacccccaaagttgaatgatttctttatttttcatgaccctccagctttagctacggtcttttaaggctcaatggtaaaaatctttctactaaatgttacacttaattgattattaattttaaaattatattcacagaattggaaaaaaaaacaacaacagaatctttagggtaatgaactactgcttgctgattaaagtcaacaaaattccattcaaaaaaagttatgactcaagactgtaattttatgcatactgcaaatgaatatttcattccagttctttctctgaagttattattttaaaaaaccactgtaatcaccatgaaagtgtttatgccagttacatagtagtcatcaaccgctccaaacatgaagacggtatttctacactttcacactaatgaaaatactcaagtgagaaaggcatatatgattttacacttaagaacctgtattctactaaaaggtaagacttaaaaaattcggccacaaaaaagtattttacattttctctagtgaatctattagtgttttacaatcactccatatgactgtggtagatagctttatttagttgcttaccctgctaaatatatacatttaaaaagaaatattttgatttcagcagaataaactaaccaaccccaaagtcctatatgttaaccctttgtgaacttttatttatttatttttttgagacagtgtcttgctctgttgcccaggctggagtgcagcggcatgatcatagcacactgcagtttcgacctcctaggttcaagtgattctcctgcctcagcatcccaagtaggtgggacagctggtactacaggcatgcaccaccatgcacagctaatttttgcattttttgtagagatggcatttccataggttgtccaggatcaagtgaaatcctgggctcaagtgatctgtccgccttggcctcccaaagtgctaggtttacaggcaagacccactgcacccagccttccccgccagctttttttttttttctaagacaaattcttactctgtctcccaggcaggagtgcagtggcgtgatcttggctcactgcaaactccacctgccaagttcagcaattctcctgcctcagcctcccaagtagctgggattacaggcacacaccaccaggcctgggtaatttttgtatttttttttttgtagagatggggtttcaccatgttggccagactggtctcaaactcctgacctcagatgatgtctgcctcggtctcccaaagtgctgggattacaggtgtgagccactgtgcctggccaaccctggcccccttgttaacttttctatgatcaatgtcccatatctgctttgttgattaggctcccaagtgcctggcacatagtattttctgaatgaatgactggatgatgttgctgccttccagaggcccttcaggtcttatgtgcaggctcaactgccatctctcctttgactatctagtttaacaccgagtctagccaatttctcagatataaactgttcagtgtctataactctaaaccctgagtaattctcatcatctcacagcaagattaccatggcaactgaatttattctatacacagtagcaataatcactttcattgtgccacttcttactcataaaatgctttaaaatagagtatgtcataagtcataagccatcccacaactggtgccgtccttaactaatgttattttctcacagaccaacaatgttctccatcccggtctactcctaaaaccttacttgccctttcatcttctctaacaagtaatgcccattttctgtccaaaatggtctttcctaggcttagctattcacaccatgatttaacaaatctctttttaaaacaatgtggagtacagattatcataaactagggaatacattttatatgtacatttaaggactaatcctaagagaacgttatcagataatttaaataccagataaaactaagtgtctttagagcaggaactgtggtttttgcttctgtatttctcatgcctatcccagtgtctggcatatagcaaatgctaaataaatgtttgctggatgaataaatgaataatgagtatgaattctagataaaaccaaaatagtttcattcagctgggcatggtggctcacgcctgtaattctggcactttgggaggccgaggcaggcagatcacctgaggtcaggagttcaagaccagcctggacaatatggtaaaaccccatctctactaaaaatacaaaaattagctgggtgtagtggcgcgtgcctgtagtcccagctactagggaggctgaggcaggagaatcacttgaacctgggaggcagaagttgcagtgagccgagatcgcgcaactgcactttagcctggagacagagcaagactccgtcttaaaaaaaaaaaaaatagtttcattcaaggaaagtatggaagtagtcaagtcagagctgtatgtaagaggaatagctgcaaagtatcaatggtgcccaggctggagtgcagtggcgtgatctcggctcgctacaacctccacctcccagccgcctgccttggcctcccaaagtgccgagattgcagcctctgcccggccgccaccccgtctgggaagtgaggagcgtctctgcctggccgcccatcgtctgggatgtgaggagcccctctgcctggctgcccagtctggaaagtgaggagcgtctccgcccggccgccatcccatctaggaagtgaggagcgcctcttcccggctgccatcacatctaggaagtgaggagcgtctctgcccggccacccatcgtctgagatgtggggagcgcctctgccccgccgccccatctgggatgtgaggagcgcctctgcccggccgcgaccctgtctgggaggtgaggagcgtctctgcccggccgccccgtctgagaagtgaggagcccctccgcccggcagccgccccatctgagaagtgaggagcctctccacccggcagccaccccatctgggaagtgaggagcatctctgcccggcagccaccccgtccgggagggaggtgggggggtcagccccctgcccggccagccgccccgtccgggagggaggtgggggggtcagccccctgcccggccagccgccccgtccgggagggaggtgggggggtcagccccccgcccggccagccgtcccgtccgggaggtgaggggcgcctctgcccagccacccctactgggaagtgaggagcccctctgcccggccaccaccctgtctgggaagtgtgcccaaccgctcattgagaaggggccaggatgacaatggcggctttgtggaatagaaaggcgggaaaggtggggaaaagattgagaaatcggatggttgccgtgtctgtgtagaaagaagtagacatgggagacttttcattttgttctgtactaagaaaaattcttctgccttgggatcctgttgatctgtgaccttacccccaaccctgtgctctctgaaacatgtgctgtgtccactcagggttaaatggattaagggcggtgcaagatgtgctttgttaaacagatgcttgaaggcagcatgctcgttaagagtcatcaccactccctaatctcaagtacccagggacacaaacactgcggaaggccgcagggtcctctgcctaggaaaaccagagacctttgttcacttgtttatctgctgaccttccctccactattgtcccatgaccctgccaaatccccctctgtgagaaacacccaagaattatcaataaaaaaataaattaaaaaaaaaagtatcatatacgaaagtaaactattacatggagataatgccacacaaaattgctaatatcccatatatctcaggtctggctaccatcttaaaactttctacccccaaattttaatttcatctacaaacagttttgctcagagaaataaaccacccatttgataaattaggtttataacccacatactataatatagtcatccaacagatctttattaattacatatgatggggccaagcactacatatataaacatgaataattgtcttcagatacttacagcctagaaagggaaacagtcaggtaaaccagcaattacaattagggcacagacattcatcaggtactacagcagtagcaaaggaggtgggaattggttaggaaaaacttcctatatttagctgatttctgaaatggaactataactatagggagatcaggtaagggtatttcagactgaagcgaacagaatggataaagcttgaaagaacatggtcagtttggagtcatgctggcaaggctggagtgtaagtcatggggaatagcaagagttgagagtgggcaggagttaagatcacacactgtcacacagagctgacagagttaatggtggtaaaggagagatgacagagccaaagtaaatagcatgcttttaatttggtgactgaatatggtgacatcattcaccaaggaagggaataacgatttaacacatttttatgtggctttgagtaggaaaacactaaaggtaatttcatgcagtgaatttgaggtgccttgactcattcagatagggatgcttagatagcagtagtacatataaattttgtttgaaggaagagatctgaagtagaaatacaatttatgcgtctagaaggtttaacttgtgttggtgcagcagtcctggaaataccagcactctatggtcacattccttatatgtttcttctatatgttatgtacatgcatttaatatatttttaaaatcaggagaataatctcttttcctaatttgtaattctctataatgcctatcccttagttcttgttacagtgtgtatgcagcaaagtgctgactaagagataatcaattggctaaaggggaagagatgagcgaaactgcataaacaggaacagaggagacatggaatatgtattctgacaataacaaattcgaaaaataaaaccaaaggaattcatatcgcttactctggtgtctgatgtgttccactttgcagaaatatctaaatactttttttaaaatgccgtctgggcatggtggctcatgcctgtaatcctagcactttaggaggtcaagtagagagactcacttgaggtcaggagtttgagaccagcctggccaacatggtgaaatggtgaaaccccatctctactaaaaatacaaaaaattagctgggcatggtggtggacacctgtaatcccagctactaaggagactgaggcaggaaaacttgggaggtggaggttgcagtgagccgagatcacgccactgccctccagcctgggcgacagagcaagactccatctcaaaaaaaaactaaacatgctgacaacatactgaatcagttactgtacctgaaggttaaggtggcgtgtaaaaccttagagaaatgtttatgcagctgtctatgcaaacaacagaaatctgaaggcttaaaagacactaatgtcaaatatacaagaaatgtgaatgaatatgattagagttctgaattatgattctgtggaaaagcaacagtacataacattacaaaaatgtgcaattatgtgctcctgcctaaaaaactttttaacagttgaagaccttgctgtaatataggaacacgaagtcatcactgcacaggtgatcttagctataataaaggtttggcacaggtaaaaaagaatattggcaggcaggtgtgtacttacaggaaacagtaggagctgaagtttaagatggacaaaggggagagaagtttgaaaagtaaaagtattaatacagagggaataaacacagaaagtagtagagtaaggagtcttaatttttaaatttctcacacctagccttcctattatggatgcctctttcttaatggttaaatgcaatgttaaatatattaaactcttttctacctgtttccatgctgggagttacttgtttttgaagaagcaggcaactcttggaaatcactgaatgagtcatcaagggatcctgacttagaagcatcttgaaaatcctggaagtcatcttcttctggctttactacctaggtttataaaggtcatttaaataaatagcactgactgacaaaataaatacacaacaaatcaaaagtcaatctcaaagactgcctttaaaatttctcagtttagatacattaactcaagtgcttacggcaggaatcctgttttgtatttttaaatactctctggtacaaatggtaaaagactggtttaaatagctaatttaggctgggagcagtggctcacgcctataatcccagcactttgggagatcgaggcagacagatctcctgaggtcagaagttcgagaccagtctggctaacatggcgaaacgccatctccactaaaaatacaaaaattagctgcgcatggtggcatgtgcctgtagtcccagctacgtgggtggctgaggccagagaatcacttgaacccaggaggcagaagttgcagtgagccgagattgtgccactgcactccagcctgggcgacagagcaagactctggctgaaaaaaaaaaaaaaaaaaagctaatctatacatttgtaaaatagctgaatgatattcattgggttactgagcgcctaccatctttaaaagatatatctagccgggtgtggtggcgggcacctgtaatcccagctacttggcaggctgaggcaggagaatggcttgaacctgggaggcagaggttgcagtgagccacgaccgtgccactgcactccagcctgggcaacacagcaagactctgtctcaaaaaaaaaaaaaaactaaaaaggaaaggtcaaaatgctacaaaaaaaaaaaaaaagacatacagctatatcatgcatgtttgcaaattaagtgacacaagctcatcataaccaatcacatacatgtacaaagagtggacactgactcctaatcccacactccagaagtactgttaacagctcatttgttttaaagacaaatgagattacactatattgctctatactttaactatataacaaagacacatttccatgcagtacatgtagatctatctcattcagtttaatgattaccactgtgtgaaggaattgaaatttatttaacctttctcctcctgttggatatttagctatttctactttttactctaacaaacaatgttacaacaaaaattcttgtatatctttgctaattcgagttactattcttgggatagatttctaataatgtgactactaggatagaagatatagacatgctgaggcttttttttttttttttttttttaaactcagtctccttctgttgccaagcaggagtgcaatggtgtgatcgtaatcatagctcactgcagacttgaactcctgggatcaagtgatcctcctgcctcagcctccagggtagctgggactacaggtacacactatcatgcccagctcaacatgtagaattttgattgctattgccaagtctgcctttcaacaaggctgtaccaataagcctagagtgtattagtcacttttaccctactttttcaatgacattaaatattatatatttaaaacatttttgctaatctgagaagtgaaaaactaaagtattttaatttcaggtttagcagtttttctgaaagatacaacctaagaatttaaatgtgctcaccataatccagtaacctactctatgtatccccggaaaaaatggtgcccagattcactttcagtgattatctgaaatatgcacagcttcgccatttacctgatttgcagggtaggttggtatgaaaccactagaagcctgggctgcagctccacccactggtccaacaaggttaatgcccatgactggctgtccaaggctgaggggcatggagcccgcaggacctgaaggtatcacagttggctgactcaccggtgtaggcagagtcatagaaaagccacttaaagttggaataggagctgctgggaactggtttaaagcatcaggactcattgcaggaacgcccctctacaaatgatagaaagaaaatggattagaggattgtaaaccacatacggtcgaaatctggcagagaccgaaaggtaaaaaaatctgtagcctttgcatgtttccactccaactctcaaaactcatgaatttgatttaagaaaaaaagttacaaggtcaatgcaaacctaatacttaagaaagaaatggccaacacatatcagttctgacattttcactttctgacaagtttggttaattctatatgatcaaatcatttaaaatgactttgcaataaaagaaaaatttataccagactgagaatactttatctgtatctatgaaattttagagaagaatttcaaaacacagagtaatttcacctattactgactaactttcaagttcagagaatgttaatattaaaagtctttaggccaggcgtggtggctcatgcctgtaatcccagcactttgggaggccgagacaggtggatcacttgaggtcaggagttcgagactagcctggccaacatggtaaaaccccatctctactaaaaatacaaaaagtagccgggcatggtggtgggtgcctgtaatcccagctacttgggaggctgaggcacgagaatcacttgaacccgggaggcggaagctgcagtgagctgagatctcgccactgcactccagcctgggcaacagaatgagactcagtctcaaaaacaaaccaaaacaaaaagtctttaaacaaaggaataacttgctattatgcacatcttataaactctacatttttgaagtactatatcctgaaaatgatctaaattttaatgtacaaggagttacacaatgtagtaaaaaagatttcatatccttgcaatttatattaataaagttatttgatctaacttaagaaacattgtttacctgtgttaccgctatcatggctagaacggtataaagttcttcttttgtaagtttgccaggtgtagttcgattagctaaggcccatatctgtccaagagtttccctgggaagcccagatgacatcagaatgggatacagtttggcagtatctattccagttggagtcattgtggtttctaagattttcttataggcatctattaaaggaaagaccagattacaaatggaaacacattccaagtgatttattttttgggatgccattgttggtatacaagaataatcttcaacaaaactgctttaatagaaccgaagccatgtcagggtttaaattgctttaaacatattcaagtgcagctgggcgtggtggctcacgtctgtaatctcagcacttgggaggccaaggccagcagatcatctgaggtcaggagttcaagaccagcctggccaacatagtgaaaccccatctctactaaaaatacaaaagttagccacacgtggtggcatgtgcctgtaagcccagctactcaggaggctgaggcaggagaatcacttgaaccccgagacaaaggttgcagtgagctaagatcacgactctgcactctgcacttcagcctgggcaacagtgagactccgtttcaaaaaaaaaaagaaaaaaaaatttgagatattcaagtggaaatgtccagcagacaattaagagtctgaagtttggtactaaagataaaatttagggctagaggtaagacaaagtcttataattcagtagaagattgtaacaagacagcatgctttggactttacaagagaagctgtagagtaatgatggtgggaacagtttgaaaagagcaatgggaagtaagaattataccaacatcactcttctccagtaaattagaggctgtgagagaaaacaccattggagaaggtgctacggaaatacagcctttaaggaaagacccagtttctgttaaggtgaggaagcagaacaagtgtcttaaaaaggggggtacagttggtgagtttttgacaataacatgggttttccaaaggaccaagtgggaaatgttgttagatacagggctaaaataaagaatgccaatattgcatgggacatacttatactaaaaaattatttgctgtttacctgaaattcaaatttaactgggcatcctgtatggttatttactaaatgtagcaagcttagttagggaaatgaaacttagtagggctaagggggacagagaaactgtttaaaacaaaaattttacatctgggattataagtatggattacaggttagtgggctctccataagaacacatatttttggccagatgtggtggctcatgcctgtaatcccagtgctttgggatgctgaggtgggcgggtcacaaggtcaggagttcgagaccagcctagccaatacggtgaaatcctgtctctactaaaaataaaaaaaattagccaggcgtggtggtgcacgcctgtagccccagctactcaggaggctgaggcaggagaactgcttgaacccaggaggcagaggttgcagtgagccgagattgcgccactgcactccagcctgggtgacagactggttccgtctcaaaaacaaacaaacaaacaaaaaaaaccatattttgactagaaagtatacatgcatgtatgttttctagtcttctaaggaagagggcgaaagtaaagtaatacaaactggcagaaaatggataaaactccaaaatataccaagatctagatttcattcgtttggcttgaggacagagaagaaaagatgcaaactgtctaacaggcatttggaagaaaagccattattttaaagtacagttgaattgtacatactattttggtaacagccttttgtcattatgagtagtatcagaaaatgcatttgaatgaaaactataaaacattaatgcaataaattgaaggggacataaaaaaatagagaaatattccatgttcatgttttggaataatcaatgttgttaaaatgtccatagtacccaaagcaatgggtagtacagattcaatgcaatccctatcaataccaattacattcttcacagaaacagaaaacataatcctaaaatttatatggtaccacaaaggacccagaatagccaaagccattctgagcaaaaagaacaaaactggaggaattacagtacattactgtatattacctgacttcaaattatactacaaagctatagtaaccaaaacagcatagtaataacacaaaaacagacacagagaccaatggaacagaatagagaacccagaaataaatccacacatccacagtgaactcatttttcagaaaggtgccaagaacatacattggggagggtctcttcgataaacggtgctggaaaaactggatctccatatgcagaagaataaaactagaccccatcccacaccaaataaaaaaatcaaatggaaatgaattaaagatttaaatctaagaccagaaactatgaaactactaaaagaaaacttggggaaactctccaggacattcgtctgggcaaagatgtcttgagtaataacccaaaagtaaaggcaatcaaagcaaaaatggacaaatgggatcacatcaagttaaaaagcttttgcactgcaaaggaaacaatcaacaaaatggacaacccacagaacgggagaaaatatctgcaaactatccatctcacaagggattaataaccaaaatatataagaagctcaaacaactcaatacaaaaaaagctaataatctgattttaaaatgggcaagacaactgaacaggcatttctcaaaagaagacatgcaaacagcaaacaagtttatgaaaagaggctcaacatcactgatcatcagagcaatgtcaatcaaaactacaatgagatatcatctcaccccacttaaaatggcttttatccaaaagacaggcaataacgaatgctggtgaggatgtggagaaaagggaacccaagtacactgttggtaggaatgtaaattagtacagccactatggagaacagtataaaggtttctccatagtggctgtactaatttataagccaagattcaaaagcaacctaagtgtccattgacagacgaatggataaagaaaatgtggtacatatacacaatggagcacaattcagccataaaaaaaattgagatcctgtcatttccaacaacatggttggaactggaggacactatattaagtgaaataagccaggcatagaaagacaaatttcatatattctcattcatttgtggaagctaaaaattaaaacaactgaactcatggagacagagaatagaatgatggtttccagaggctgagaagggtagtggtgggggggaataatggggatggttagtgggcataaaaatatagttggataggaggaataagatctagtatttgatagcactacaaggtagctacagtcaacaataatttattgtacacttaaaataacttacagagtataattggaatgttcataacacaaagaagtaatacatgcttgaggtaatggataccttatctaccctgatgtgattattacacattgtatgtctgtatcaaagtatctcatgtactccataaaaatatacaattatgtagccacaaaaattaaaaataaatttttttttgtttaaagaagaaaatgcactttaaggattttcttttcttttttttttcttcttggctcagcagtaaaaatacatgtaaagaaaaagtaggtcaggtgcagtggctcacacctgtaatcccagcactttgggagaccaaggcaggcagatcacttgagcccaggagtttgagaccagcctgagcaacatgacgagaccccgtctctacaaaaaaatacaaaaattagctgggtgtagtggcatgcgcctgtagtcccagctacttgagaggctgaggtgggaggattgcctgagcctggggaggtcaaggctgcagtgagccaagatcctgccactgaactccagcctgggtgacagtaagaccttgtctcaaaaaaaaaaaaaaaaaaaagagtaaacactatccttcacatcttccaatgtgaaaaaaaagatcccacatggtcttttatttcatatagtattacatgacaagtcatagaaagaatatttttaaaaatataaactaagaattcagaaaattacattaaatattttggtaaaattcttgatgttattaattgctgaagtaaatatttgataatgtccattaaagcataataaatctaagagagcttttagaaataaaagtatgatggttgataaaacattaaaacaaaactattctcctctatttatatagttattccatatatgaggcagtcttatgaaacacgacatttatttaatttctgtactctttcagaaaaaaagaaaagtgacaactcctcctgcattttttgtaagtgcaacagtaaatatttacaactacatttacaatatttaaaccaaaatatccagatgggaatcctgggtaaagaagcttttttacctggaaccaaactctcattgtaaatccaaggaggcattctgggctgagcaggatcctgtgagggaaatactcccacacctagaaggtaagaaacattaatgtatatagtggtccatggagaagatggcgaaatcacactgagtcatggttttttacaaagagcactggctggagacactaaaaaaagtcaccaatacaattaaaatacttggtcccccctgcctccgattcagaataaaatatttggtttttaagcaactcttgtacgttaactatgttctaaagagtaaattatacaaaaactaaaatgtatcaaatcaatactctaaatcatataagccttgcaccatttaacatgtattacaaattaaggaaaaaaacatgatagatgatagtttaaaattatgtatctaaaaatatttaattgtccaagctttacttgcagtttttactaatgcttctttgcaaagtttcattgttttttaacctacatatgatactgctgtcttaaatatataggacttttgggggctttctgtccaataaaatatcctcccaaaagtttgcctccttggctgcccacattctaattcatttctgagggttgaatttatacaatttagatcttttaggcagtggtgcatatgatttattttagagaaaccaaaactatattctcattggtgacttttccagttacattttaacttttcaacctttatggaagaacagaaagtataaggggggaaaaaagagagtttttataaaataaaaggaaagaaaattttaaatcagaaatgattccaattaagaaaaccagttatcaaaatcatttttaaaaaggagtaacagtgtgttgaaagaattcagagcaaaatcttaggggttaattggagaaaggaatgcattaaatatatttcaagcaaaatttcgattagcaaaatcaagcagcattcatttgaagattaatgcttaaggtgttagcatttgagcaacatttggttaaacaagttttttgctgaatgcttcacgagctcaccactctcttcaattgacaggttttgatctgaagtattttctgcctctgcagtggtggtaccacttacacatccatctacagcaaccccgttactggccattaaactgggatacttcttactggaacctgggcctagggctttgtggccaacttcagaagtatttaatttaatttgttcctgcccagatgtacttatatcacaagatactaggaacttctcctccaaggaagggcctaaacaaagagcatgaaggattatttgtatataactgtatatgtctaatctttttaaccatccatctccacccccatattctttttttttttttttttttttgagatggaatctcactctgtcacccaggctgtagtgtactggcatgatctcagctcactgcaacctctgcctcccaggttcaagcaattctcctgcctcagcctccttagtagctgagattataggcgcccgccaccaagcctggctaattttttgtatttttagtagagacggggtttcgccatgttagacaggctggtctcgaactcctgacctgaggtgatctacccacctcagcctcccaaagtgctgggattacagaagtgagccacggtgcccagctcacccccatattctaaagggaggccctgccacgtataatgtaaacattgtggccaggcaccatggctcaagcctgtaatcccagcactttgggaggccaaggcaggcagaccatgaggtcaggagttcaagaccagcctgacccacataatgaaaccccatctctactaaaaatacaaaaaattagccaggcgtggtggcgggcacctgtaatttcagctacttgggaggctgaggcaggagaatcacttgaacccaggaggcggaggttgcagtgagctgaaatcacgccactgcactccagcctggatgacagtgcaagactctgtctcaaaaaaaaaaaaaagtaaacgttgaaataattcaatcactgcacatttgtataggacttgagagacttcagagattttagagaatgtaaacataattatctactgtgattctaaagaattctatgagacagtaggtggaagagtgtagtggaaggagcactacctttgaaatctgacaacctacataagataacacttccactaactcctagggaggcctctggccagtaacatcatcatcatctcttggtctgtttccatgtccatcaaatgagacagtctggactaagtacatgtctgccaagatccctcccagcaccctgtctcaagccaggatgtgtagctgtctctattcattttatagatgacaaaatctaaggcacaccaaggacaaattgacagtaaatggacaacctgggcttctgcccccaagtgccctgtcactgaagctgaaagagtactttctaaagaagcctttcctagctccttattcttaagaaaatgatatcggtgaatctcccaaacaacaatcttctggaaaaatcagaagatttcttttaaagttataaggcagtttaaagtgctcctagttgaggagcaaaagttttaaatcacctttctggaatgtcaagaccccagaacttaaaaatctagacacttgttttgttgaatttcaacagcagtcatacatttatgtgcatgtttatttgccaacatcactggattattctacttatataacagaaataagttatcccaggatatcttaagaatattttcattaataatgctaagagttacctgcttctggtacactgtgtgaggctgaagcagtagagaagtaaggaatttgcccagggacgccatgtaaggcaaaaggcactggactctgacttggagggagaggctgtgtcccagccttctgtgtatgcaactggccaagtggggtggaggggtggaaagactgaaagggctgggacgtggaagaaggcccacatgggggaacttcaacaggcccctgcataaagtcactgaattcttcttcatcaagaaaggcaggtgatggggagacagttttagtagaatgagatgatgtggggcaatctgcaaaatggaaaatggcaatgaaacacacaaaaatggaaaccaacagagaaaaaggaattaagatgtagtacaattccaaaagaatatattgaaacataaatagtggaggtgaacaagaaataacaagtaacaatagtcaaatggaattgcatgatgcatgtaaaacactttgatgtctatttatacacaattttatgtctttttaaaggggagttttaatagctattttgtatttggttcaaaaaaggtaaaactaaaaatacatgtatctattcatttattttagagacaggatcttgctctgtcacctaggctacagtgctgtggcatgctcatagctcatgatcatagcagcctgaaactcgtgggatcaagcaatccttcagcctcagcctcctgagtagctaggaatataggcacatgccagcatacccagctaattcttcctttctttttttttttcatagagatggtgtctcactatgttgcccaagctggtctcgagctcctggccttgactgtctttcttttattagattaataatttttcccctgagaccattaatgatttacatcaaagtgatgattatttttgcagttgaaatgatctgtttatctagataatattatctcaaaccaatatacatcagatataagaaaacctaccaatatagtgctgaatacattttggacagatatataccatgatgactaaatttcattatttattaagaaattcagtaagaaataatgcacaatacaaagctgtaatttttgaaatatcatgcccgatccacacacttgcatagatcatatttcagtaaagttaccatatgagaaataaaaattacaaaagaacttttttttttttttttgagatggaatcttgctgtgatgcccaggctagagtgcaatggcatgagctcagctcactgaaacctctgctttgttcccccggttcaagagatttttctgcctcagcctctcaagtagctgggactacaggtatgcaccgccatgcccagttaatctttgtatttcgtgtgtgtgtgtgtgtgtgtgtgtgtgtgtgtgagagagagagagagagagagagagacggagtcttgctctgtcgcccagactgttgctctgtcgcccagacttgagtgcagtggcgcgatctcggctcactgcaacctccacctcctgggttcaagtgattcttctgcctcaaactcccaagtagctggggctacaggtgcgtgccaccacacccagctaacttttgtatttttagtagagacggggtttcaccattttggccaggctggtcttgaactcctgacctcatgatctacctgccttggcctcccaaagtgctgggattacaggtgtgagtccccacgcccagcccaatttttgtatttttagtagagacgggggtttctccatatcggccaggctggtcttgaactcctaacctcaggtgatccacccaccttggcctcccaaagcactgggattacaggcatgagccaccatgcctggccaagacaagaacattaaacacattattaaggtgatattttcttgtgaaaagcatcaatattaggatatcatgaagagctgaatcaaacaactatagtcaatttaagaaagtaaaccctgcctgaagactacaactacctttaaaagatctttggcactaaaggatataaatgtcactgtggctttttattgttaaatgtaaaattcacttatgtaataaacctgctctactggggctacatttaacatgaagctcattaacaatactattttattgttgcttcttcacatttattattattattactattattattattattattatgatactgggtctccctctgtcatccaggctagagaacagtggcacaatctcagctcaccgcaacctctgcctcccaggttcaagtgattctcgtgcctcagcctcgcaagtagctgggactacaggtgcccatcaccacgcccggctaatttttgtatttttagtagagatggggtttcaccatgttggccaggctggtctcgaactcctgacttcaggtgatctgcctgccttggtctcccaaagtgttgggattataggcgtgagccaccacgccttaccttgttttgtttttgtttttgttttttggagatggagtctagctctgtcgcccaggctggagtgcagtggcacaatctcagctcactgcaacctctgcctcccaggttcaagcaattcttctgcctcagcctcctgagtagctgggaatacaggtgtgcaccaccactcctggccccacattttttttctttttttttttttttttgagacagagtctggctctgtcgcccaggctggagtacaatggcatgatctccgctcacagcaacctctgcctcctgggttcaagagattctcctgcctcagcctcctgaatggctgggattacaggcatgcgccaccacacctggctaatttttatttttagtagagacagggttttgccatgttggtcaggctggtcttgaactcccgacctcaggtgatccacccacctcggcctcccaaagtgctgggattataggcttgagcaaccgcacctggcctccccacattttaaattactttgaattgctttaatatgactaaagtctattgtcacaataagcagtctttttttttgtcactgacttgaagctcaggagtagtcttttttttaagaaatggctcttgtctgaaaaatggagaccctgcatacttctttcctctctttaggatcaatgcaataaaacctggatgcactgaaagttctaagaaagatgcaaaatatgcaaaattattgccttaatcaagtttgtttaaaaaagaaaaagccctcccacattgtattccaagtctcccaacaattaccaaggctggatttaggttctcaatttgggttcccagctacttaaaatattttttaaatggaccctatttccttgggatatactgtaaagaccaaaccaatgtttctttgcatttggctggaatgtgtgacttctacatggaatatattttggcccataccaactctagcagctaggtatatgattaaaaagaagtataaaagttaaatgatgggccaggcacagttgctcacacctgtaatcctagcactttggaaggctaaagcaggtggactgcttgagcccaggagtttgagactagccagggcaacatggtgaaatcccgtctctacaaaaaatacaaaaattagctaggcgtggtggtgcgcatctgtagtcccggttactcacgaggttgaagtggtaggattgtctgagcctggggggtcatggctgcagtgaactgtgatcatgtcaccgcactagggcaatagaatgagaccctgtctcaaaaaaaaagttatatgatcaatatagtttgtatattcagtattttaagataaacaatctataaagagaaatttaaaaggtgcctttggtggtagaatggctggaaactctttttataaatactttaggactaggtttttggttttttttttttgagatggagtctcactctgtcgtccaggctggagtgcagtggcgcagtctcgactcactgcagcctctatctcccaggttcaagctattctcttgcctcagcctaccaagtgactgagattatagggacgtgccaccatgcctggctaattttttgtatttttagtagagatggggtttcaccatgttggccacgctggtcttgaactcctgactgcctttctctacttttcctaacctccagcctaggtctagttttagtattaacttctaatatatattcctaaattacttcttgactagcttattcaccttataattttcatttttagatatgtttttcctttctaatctcagcctgattgctaatatctgttttcttttcaatcttgtatattttattttggggcatacttttggaatgggaatcttaagtgaaattaacagaacagagtcaaagttgtcccggaaaaatcaagaactggttactatgccagtgattattccctcttgatatcacccatgaaaggtactataatacaagggttcaagataaaatttatcaatgcaacattttccagcagaagatagtactttcttggctggctaaatgatttatgaaaactgttcacctattaggtatgttttcttggaatcagctgataaaatgtcaaaacgttgaatttgttttttgttgttttttgagatggagtcttgctctgatgcctaagctggagcgggcagtggcatgatctcggctcactgtaacctccgcctcccaggttcaagtgattctcctgcctcagcttcccgagtagctgggaatacaggcatgcacaaccatgcccagcttatttttgtatttttagtagagacaggttttcaccatgttggccaggctggtcttgaactcctgacctcaagtgatcccacctgcctcggcctcccaaagtgctgggattacaggcatgagccatggcacctggcttgaaatgttgaatttttaaaaataatgtggtaacaattatgcaaatacaagactcatttcaactgctaaatgttcaaaagaacaaccaaaccccaacctccaatccctttaccctgctctaaaacagggacgtttctttttgcttacctgacaataaatgatgataaaaattacaaagaaatgcattagggaaactaacatttcaagaagagcattattatactcatgattttcttaaatgaggcattttaagaatttgtaagtttaatcacattaagtaatgaaatcagagctagttcataaaaattactataaaacaatgagaattaaatggtaaactcctttattacatttgctctgagtgaatagattttactaatgttaacatatttatatacagaaaacttacaggtgaaattgtcatactgatatttaattagaagacaaagaggttttttcctcccaagacagttgttatccagaccagagctcttaagccactgtatatttgagaacatccaaatctgtacttagcttgaaggaagagttctacattgacttttcacacacacatataatggcgaggtaaagaaacagggactacataaatcaccttcccagaaaagaaaaatataatgcctcttaaaactacctggtttcttggggtgcgatgctggagtagggtgcatttttgcatctctggaaaacccatctaaatttccttttatggcttccaaagcatcatctctactcttctctcctgtctaagagacaacaaatatatgcgtatttctttacttatccctcactgtatcctaaaccctcccaaattaagaaaagcacagatattcatctatttccaatatttttaccacatacttctgataatgaattatccaagtcagcaagacattggtaaatgattaaacaatgacactccacagaaaataaaaacattacaaggccaatgtataaatactttaggatagacctgtttgatattaagtgtcctgtgaaggctctaagagaaatatgaaatatcactgaattcaggattactgcttcccaagaaaaagattataaacattgccatgatactaaaaaagagctgaaaagataatggctgatagcctattctcattgacagcagtgtatctttacagaaaatgaaaaacccttcacattagtaattaggtaaaccaaaatgagaagaatcaatcacagcctcagcttgggctggtgccccagtgacgaaatccactcaatgagtgggaagaggcacattcagggtgtgtatgttctgggtgaagagaagtattgaaatactaccttgggtttcacactgctcaaaagtctgagcttttgcttctgctcttcaaactggcgtctttttctttcttcttctaagagtttttgctgctgttcaaatcgtttcctgaaggaaaaatgatctaataaagaaccagctcccgggattatacactgtgttttatattcagatttctaacagtttcagcaatatcatgttgcacttccagaagtgtaaatttcattgctaaatatctagttttcttacgacaatcctgtttcctcactatattaattccaaaatatttgacatgagtctaaagaatgatttacctaaattatgtatatgaatttatttctcatctaatttgcaagaggaggaaacaagcttttgcatataaaagtattctcgaaaaacaggcagacaaacataagaacacactttgctctgcatattaaaaaagaacctgcttgggaaggcagtgtcatacagcagaaagagtaatgatttgggaatcaggaagcctgcctttgggtccaggctttgctggtaactgtgtaacctggactgacaagttgtttcattttcctggacttcactttcactagatataaaacaagagggttgaattacaggatctctaaggtcctttttgactctaaacttataataatggtagtttaaagaggcttttttgtttttgtttttaaacagggtctcactctgttaccgaagctggagtaccgtggcatgatcacggctgactgcagcctcaacctcggggcccaggtgatcctcccacctcagcctcctgagcagctgggactacaagcatgagccaccaagcctggctaatattttgtattttttgtagagacagggttttaccatgttgctcaggctggtctcgaactcctgggctcaagcaatctgcccaccccagccttccaaagtgctgggattataggcatgaaccactgggccaggccttaagagttttaaagacaacttttgactgttttagtttcaaatctgcactagagatcattagacaattcttaagatagatgctataatgtatctttgttatcctttaattctggtgatctcttactgctgctcttcggcaaactgcttctgcatgtctggagtgtactgtgggcctggaggacgcatgcccaggaagggtgcttgtcctaggtaaggcattcccgctgctggcattggtcccattggtattcctgcctagaagaaacagacaaaggcttaaaaaacacaatttatccctttaattatcacacacaaaaatgtgacttccataaattctatcttaatactcttatttgtaaaaaatagaaatatattggattaaaagatgcaaagatgcaaataaataaaagatgcaaatatacaaagaaatatattatattaaaagatgctaaaaatggaaggctccccttaatatctaacccctccattcccttcactgtcccagaggtgaccactgttaatactctgattggtgtgttatggaactatatgcccacaagttatattcttgtgagctcactaatcctctttgagaagaggcattatatcttatatattttcatatttgcaataataggtaagagcctggcatatggtaaacataccacaaatgaaattaaatctgattttccaatatatatgagaggataatgaatattttgatgttatcaaaggcctaatagtcaaacttttatagaaaatgacacatattcaataaaaaattacataatattataaagtttgttaaagtgtccagaaataataataacacaatagctaatcacaaaatttaataatattatgtttttagagacagggtctcgttgtgtcacccaggctggagagcaaaggcgcaatcacaactcactgcagcctccaactcttgggctcaagagatcctcccgcctcagccccagagtagctagggctataagcgtgtgccctcgatggcacctggctcaaaatctaatattaagaatgatgacaatgacaataattaaatggctaatttttaatgagtgaaaactcttctactactcaaccttctccctgaaaagttcctcttctgtccctaactaaagtctgtccgtgaaacactctcatttggagactgctacttctcttctatatttcctgtaagtggggaatattcctccttgcttcttctaaaccttttctcttctctctaccttcaaaaacctgaatacattttaatttctcactaacagacttcatcatctactatccgatcttgttcatgtcatctactgaccctcaacttcctcactcttcagttgaacacttcagacattgctgtcttccattctacccccaaactgctcttggtaacgtcaacaatcacccacatgggtaactcacctaacactgtgtggtcttccaggtctttagcctcctcatcacaatcatgcccaacatacaattccagcttcccattccatggtaatacccatgatctatctgcaccaaagactgtgtcatgtccaaaatctggatgttaggcatcccgacacttgaccaccacctcctatccttctagctcatctagatcagtaattctcctatctcattaatatctcccacctgttaatttattttttttccgtgagcttattttgtaggttccacctgttaattttgccacttttctcatgattaatcatcttcattatatcctcacttcccttcttgctcaacttagattctagggttccatattaaatgcccttgtaaatatccttaattcccttaattgtcaattccttaacatggtctcctgggaaacttcacccctgattagaatcaactaatcgacttctctatgcttatacaaaaaccactgaaccatgctggagagaaaaacattgaggattcactttaaattcttttttttttttttttttttttgagacaggatctcactctgtcaccaaagttgggatgcagtagggcaatctcagctcactgcaacctccacctcccgggctaaagtgattctcccacctcagcctcccaagtagctgagactacaggcatgtgccaccacacccaactaatttttgtattttcagtagagatggggtttcaccaggttggctaggctggtctcgaattcctgacctcaagtgatccacccaccttggcctcccaaagtgctgggattacaggcatgagccaccacgcccagccagcttggaatgcctttggagggtttctagcactgtacaactggagttacacacaatattggtttattgctaacattctctattctaaatcttgggtggagatagctgtgtatacttattttaaatcatagtattgatctcttgctgctaaaaattagtatcacagtcctagaattattcttttttttttttttactcatttcacccaaagtatataaaatacaaaagaaactacccaaatcatagagattaaaaataaggcaaagtattctacaaaaataataaagaatgaaagaaagaaaggtgttatgcatattgccttcttatttacaaactcctttcttgaggaacattcaaatttactaaatggcattttgtgtttcccctacacctggaaaggagggactgtctaacttttaacagacttttgaaacctaaataaactaaaaggttaagagatactagtctttaattatatactgaatggatgacataacaaaagaaagaactcagaaatctgagatacatttgataaactactgatggcacttaagatttcaataagttgagaagtatagtatgacagttaagactaaaagagtaaaagtgtccacttcagtcagagccccaacagtgttttgacaagttgatcttaaaattatactgaagggcaaggaccacgaatcagctataattctgtaaaagaagaaggatgatccatactaccaggtatcaatgcttatttcaggctagataattaaggcataagatatttactgatgcaaggaaagacagatacagcaatgggacaaatacatgagctcagaaattaatccaaagcatataaagaaatgtgatattacaggaataatcatagaaatcaataaattaaaaatgggctatttagggccgggcgcggtggctcacgcctgtaattccagcactttgggaggccgaggtgggcggatcaccaggtcaggagatcaagaccatcctggctaacacgatgaaatcccatctctactaaaatacaaaaaattagccgggcgtggtggcgggcgcctgtagtcccatctattcgggaggctgaggcaggagaacggtgtgaacccgggaggcagagcatgcagtgagccaagatcgcgtcaccacactccagcctgggcgacagcaagactctgactcaaaaaggaaaaaaaaaaaggctatttataaatgatttgggaacaactgactacaatggaacataataaaattacatccttctaccacacactgattctaaagaacaattctaggtaggttagagacttaatttgaaaagacaggccgggcgcattggctcacacatgtaatcccagcactttgggaggctgaggcaggcagatcacttgaggccaggagttccagatcagcctggacaacatggtaaaatcccatctctactaaaaatacaaaaattagccaggcatgatggggcatgcctgtagtcccagcttctctggaggctaaggcaggtgaattacttgagcccgggaggcggcagctgcagtgagctgagattgcgccacattccagcctgggcgacagggcgagactctgtctcaaaaaaaaaaaaaagaaaagaaaagaaaagaaacttaactttttttaaataagaagatacaggtagggaagaatgtcttagataagtcagaaaaaaaaagaaatgatttatccatctgtcttaattttgacacaacatgacactataaacaaaattaagagatgccaacaactagcagaagatactggcaacacatgtaactacaaaggattagaatctagaatatataatgaacactcagaaatcaattaaatcaaaacagcaaaacattagaagcaatttaaatgtctgtcaatagaacaacatatattcactctatgaaataccacacagcagctactatgaatgaacttggcataaattaaaaagtcaagaatttgaagggtacatacgtaaaatttaaaacctaggaaatatgatatattgctcatgagtatacaaatatataaaataatacaagtataaaaatatggccaggcgcagtggctcatgcctgtaatcccggcactttgggaggcagaggtgggtggattgcttgaggtcaggagttcgagaccagcctggccgacatggtgaaaccccatctctactaaaatacaaaaattagctgggcaaggtggcggacacctgtaatccctggtactagggatgctgaggcaggagaattgcttgaacccaggaggcggagtctgcagtgagtcgagatcgcgccactgcactccaagcctgggcgacagagtagtataaaaatacatacgagaactataaacaccgaattcatgatagtgataacaacttctgaggaaggagaggaaggaaagtatttttcaattctttaaaaaaatgtaaaacaaacgtggcatattaaaatctgataaaggtaggacatgactacccatattaaaaaatcccatggaatccacaaaaaaattcccagagctaataaaatgagttcagtaaggttgaaggatataaaacaaacataaacaatcaattgtatttctatatactagcaatgaatatgtgaacactgacatttaaaaaacgccattataattactcaaaaaatcaaaatatttagatgtaaatctaaccaaacatggatgtgacttttatgctgaaaactatgtaaatgatagtttacacagtcttctgatagaagaaaccaaagatctaaacaaatgaaaagacatctcatattgatatgttggaagacatcaattctccctaaattcatacagaggtttaacacaatgcctatcaaaactccagcaagagtttttccaaagatagacaagactatcccaaaattaatatggaaagacagaggaaccagaatagttaaattttgaaaagaagaagaatgtaggaggaatcaaccttatcgtatagctaccgtcatgaagactgtgttattggtgaaggaacaggcatatacataaaacaatagaacagaacagagaacctagagaaagatccatacaagcatgcccaactgatttttgacaaaaatgtgaaagcatttcaatggaagcagaatagctttttccacaaatgttgctggggcaatcacacttgcataggtaaaaagagagagataaaaaacaacctcaatctaagtcttagatcttacacaaaaattaacttaaaatggatcacggacttaaattaaaactataaaacttttagaaaaaaataggagaaaatcttcagaatctagggcaaggcaatgaactcttagagttataccaatgcatgatccataataggaaaaactggtaaattaaatttcatcgaaattgaacttttgctctgtaaaagaccccgttaagagggtgaaaagacaagctaaagacaagaagaaaatacttgtaaaccacatatctgacaaaggactagtacctaaaagatataaagaactctcaaaattcaatagtaataccaaaaaatgcaattagaaaatggtcagaagctatgaaaaggcatttctctgaagaaaatgtaatgatggtaaataaacaaatgaaaagatgctcaacaccatctgcacattaaaaccatgcaaattaaaaccatgagatattacaacgtacctgtgagaatggctaaacaaaaaataatgacactaaatgcaggtaaggatgcagtataattgaacctctgatacattgccggtgggaatgtaaaatagtacagctactctggaaaaaagtttggcagcatcttaaaaaactgaaaatgcaataccatgcaacccagtaattgcactcttgggcgtttatcccaagaaatgaggacatatgttcacgcaaaaacctttatttgtaatagccaaaaattgtaaacaactctgatgtccttcagtgagcaaaaggttaaacaaactgtcatacatccacaccatggactattactcatcgattataaaaaaaatgaactactgatacatgcaacaatttggatgaatctgaagggattattctaagcgacaaacgccaaacccaaaaggttaatgattcaatttatataacatttttgaaaacacaaaattatagaaatggggaacacactagtgaatgcaaaaggagtaaggtggggcaggaaggaagtgaatacagctacaaaaggacaatgtgaggagatccttggggagatggaaatgttctgtatctcagctgtgccaatgtccatatgctggttgtgttactatatttctacaagttttaccaataggggaactgggcaaaggatttctattatttcttacaataacacaacagtttgcaacaggtttacacatgtccatcatgtgctctaaacttgcctagatgtttgaaatgcttcagaataataattttaaaatgtattgtacatcatgaggagtgttttctttttatgtgttttggggaagggagagattataataatcaataataatataataataatcaagactaaatttctggccggcgcgatggctcacacctgtaatcccagccctttgagaggccaaagcgggtggatcacttgaggtcaagagttcaagaccagcctggccaacactatgaaatgctgtctctactaaaaatacaaaaatgagccagatgtggtggcatgcacctgtaatcccagctgcttgggaagctgaggcaggagaatcgcttgaacccaggagacagaagttgcagtgagccgagattgtaccactgcactccagcctgggcaacagagccagactctgtctcaaaaaaaagactaaatttttttatgttgacttttatctgaatcatcacttttatctccaaagacttaagagataactaaaggaacaatgggtttgcttcatgtatgtccctgattggttagggctattgagtttcggggtggggggaaataaaatctggatgtttttctccttaaaaaatggtgagtggcggacaggtgtggtggctcatgcctataatcccagcacttcgggaggccgaggcaggcagatcacctgaggtcaggggtttgaaaccagcctggtcaacatggcgaaaccccatctctactaaaaatacaaaattagccgggcgtggtggcacatgcctgtaataccagctacttgggaggctgaggcaggagaatcgcttgaacctgggaggcggaggttgcagtgagccgagatcgtgccattgcactccagcctgggcaacaaaactccctctcaaaaaaaaaaaaaaaaaatggtgagcagcttccaaacagtataatgcctgtcagcaagattaaaggttaaagaaaaagactttggctgctttgtcttagaatcattaatacacaagcttctgatattcagggacattattaaggtactaacaactctcatagtttacttttttcttattgttctgcatattagagactcttactgtttttggttgtttcaaactctaaaaacatttttcagataattgtgtaagtcataaaataatgtttatgaatattattttaattatattaattacaatattaattattttaattatattaattacaatattaattattttaattatattaattacaatattaattattttaattatattaattacaataatattaattttaattatattaattacaatattaattattttaattaatatttaatattaaaataaaaattaatgatttaaaatttgtatcaattgttattaagattcagtattaagcttaggaagtcttaatttaaaatacattgtattctatggtagattgtttttagttatttgctgcctttcttcttcttttttttttttttttttgagatggaatctcactctgtcgcccaggcgggagtgcagtggcgcaatctcagctcactgcaacctctgcctcctgggttcaagcgattctcctgctcagcctcctgagtagctgggattacaggcatgcaccaccacgcccggctaatttttgtatttttagtagagacgaggtttcaccatgttggtcaggctggtctcgatctcctgaactcatgatctgcccacctcagcctcccaaagtgctgggattacaggtgtgagccactgctcccagccatttgctacctttattctaagagaactacacatccctatgtggtttacattcgtcctggtatattcctcccctattgatgttaaggccacattactttggtgagcagaagtgactaataaatgctacctccaagtgttagctttaaaagacatcacagggtttggccatctctttttcctatgccaagagcctaggatgtcctggctgagggtcttaggataaagaaaacatggagcagagtcagcactaacccataaggatatgtatcacgagtgaggaataaacttttctaagtcactgagatctggggactgtttctgcagcacaccctagtgaaagctagcttaacatgaattaaaaacctacacaatttcaatgtattcccttccttctagagacagataaaaaatgacactggaagttttcctgaccctttaaacacaaaacagaagctttatttgcataatcgacttcaaaacaacaatggtttcaacttaaaattctggtcatgaagtcctaatatcacttatttataagttatatacatgtgttactgtataaaagtatatactgtataacaaaacacacagaaatagaaaatgttaaagtattaggtaaataagtaaactaacgcagaaacaaaaaaccaaatactgcatgttctcacaagtgggagctaaacactgggtgcacatggacataaagacaggctcgacagacattggagactacaagacgggagaaagtgggggaagggttgaaaaactacctgttggtactatgctcactacctgggtgatgggttccatcataccccaaccctcagcatcacacaacatattagtgtaacaaacctacaaacgtgccccctgaatctaaaatataagttgaaaaaagcaaaaataagtaaagtattaggtaaaaaagaaatacagtatatggccttcaagatagctgttaatagtacaaaagcaaaaacctttttttcctctggcctttttttttttttttgagacgggagtctcactttgttgcccaggctggagtacagtggcatgatcttggctcactgcaacctccacctctcgggtttaagggattgtcctgcctcagcctcccgagtagctgggactacaggcacatgccaccacgcccaggtaatttttgtatttttagtagaaacagggattcaccatgttggccaggctggtctcgaactcctgacctcaagtgatctgcccgccttggcctcccaaagtgctgggattacaggcatgagccactgcacctagccttttccctcactcttggagggtgaacacatcttcattttagtttgaaggaagccatttatttatgcttatttctaattgtaacattaagctcttagcctgtagctcttgatatataaacgtaacaacaaacaataactttgtaagaaaccaactaaagaagcaagtacctgcatagcaataggtccttgggacatctgagagctgtaattcattcccataatgccttgcatattaggctgcatgacagagaccataggaaatccttgttgctgcatcggcatcaggcctgctgaaaatataaagacattattaaagtcaatgtgttttaaagtttattttcttaaaaccataagtacctaaaggacttgttacttggcaggaagcagagtgtaatggaaaaagcacagggtcctgagtgagacagatgtgaatatgaattccaactccatcatttacttagctgtgtgatcttgaacaagttacaaaacttcatctgtaaaatgaagataatatctcttctatggaatttgtatgcatattaaaaaacagtatggcctaattggggtactcagccttcaagatggcctccaatgacctctgtctcctggtattcatacccgtgtgttgttccattccatactgaatggggctgatcagtataaccaacaggatactgtggaaatgacagcatgtaacttcgaaggctagttattttttttttcttttgagacagagtctcactctgtcacccaggctggagtgcagtggcatgatctcagctcactgcaacttccacctcctgggttcaagcctcccaagtagctgggactacaggtgcctgccaccacgcccagctaatttttgtattttttagtagagatggggtttcgccatcttggccagggtggtcttgaactcctgacctcaacacccgcctcagcctcccaaagtgctgggattacaggtgtgagccactgtgcctggcctgaaggctagttcttaaaagacactgtagtttcctcctggttcttttggatcacttgctctggagcaagccactgccacgtcatgaaatactcaataagacctatggagaatccatgtggtaaggtactgaggtcttctgccaaaaggcagcatgaatttgccatctatctcagcgagccacctcggcagcatctccatgaaactttcagatgactgcaagcctggctgacatcttcactgcaatctcataagaggtcttgagcctgaaccacccagcagagctactcctagattcctgaccgagagacacactatgaaataataaaatgtttactttttaaagtttgggataatttgttacacaacagcagataactaacaaaataacagttaggagcatgaactctgggagccaactagaaatgacacatactattttggaaccttgggcaatctgcttctttctatgccttggtttatcatttgtaaaactgtttaatacttactatgctcaaagaaatgttattcttcttcctttttcttacatgaataggtaatataacagttaccacaaaatagccatcagcatgtgcaatggcagaaaactatcacgaatgtatgatttaggctagtgtttcccaaacttttccaagagcagaggtgaatgaatatacatccctttgggattttaataaatactaaatgcttattatatgctaggcatagttctatgtgcttggtacacaagaagtgaataaaacaaaatccctacatagtctgagcacaaatttcattctaattttgcattcaaactacatctatgttggttctaccataaggaactttatatcaaactgtcagtttgaaaaattaaagatctaggaaattataccatgtttatcttatggtttttgtgtacctcccaggttatttataacctagcctaatttcagaagcatggacatccacatttgtggctaacagttattagaggtaggccattcacttattcaagtatttgaagcctactccgtattaggcactgttctagggacatagccatgaacaaaaccaggtcttcactctcatggaacttacactgtaattaggagagatagataacaaaaaaataagtacatgtcaggtggtgataagagctagggcaaaaaataaagcagggcaagggggaatggagtggttgctattttacatagggcaatcagaaaaagttttaccaacagggtagtatttcaacaagaacctcaagtaaataaagaaccaagccatgcagatgtttgggaaaaatattccagaccaaagaacaccaagtacaaagatcacgaggtgtcagggagaattagaatacacagattgaaaatagccacagtaagatgttttccgtcttatttctttggacttaaagttttattgattttaactgattttattttatttctgaatgggtaactcagatatctggcataatatttcaaggcacaaaagtgtacacagtaaaaaataggtctctttctctcctctgtctccggttcaagtactcatgatcttgtggccatgaccttgctgtcggtttcttacatatgttttcagaaatgatccatgcataatttaaagccttcaaatgatcaaaaagtccattctaacaactgttaaaaaaaaatctccaaaccaattccaaattccctaagaaaaaatatcaggcaacactttggggtctcttcttgtccagttcctttgctccatatgcatatttttacttgaaagtgtatagaaatgcaaaataacaaacatgataatggacacataactctgtaataccttcctaaagaacaaaagatctcaaaccatttgatctcaatctgggacacatctaattacagatagcttaaataatgcataaatgtgaacacgatgaaaagaatacaactgagccttggaaaaacttacctgaaacccaaccaccatcactgattataaatgaagacaaagtcaggatgagccactgaccacctgctactgagctgctctttatcttttatctctactgctgacctaggagtctctgtttctttagcaaatctatgacaaccaatcaacgctggctttttaagaagagccagttttcagaagcagcttggtgtgacgggagagggaagactgtcagagtgaaagaaatgagcggaaagaagccagatgaaggcagatctattccttcttcactgttgtgtcccagttgcatggcagcatgggtcaaaattatattccttcactactatttccttgaagataaagctagaattgatattggtgggtcctagtctgagaccaagagagaaaaggtatacttagagaaatttctaggaatagaactgagacttggccggatgtggtggctcatgcctgtaatcccagtgctttgggaggccaaggcaggagaatcgcttaagccgaggaatttgataccagcctgggcaacatagggagaccctgtctctacagaatatttaaaaattagccaggcgtggtggtatgcacctgtggtcccagctacctgggaagctgaggtgggaggaatgcttgagcctaggtggctgaggctacagtaagctatgactgtgccacttatactccagcctggacgacagagcaagagactccatctcaaaaataaaaataaaaaaccaaacaaaatcctgagacttaaatacttaagctgaatcagactatgtgatctcttttaatttcaaaattatatatttataaaacatgattataataagatactatcatatagataaaaaatagcagtgtaaaacaactaaagatgtttgtttattcattcaacaaacatctacagataacctattgtgctgaatcaacatgctgggtgctacaaataatgctagatgagcattagacagacatggcactaacaatctagcagaagactagatagaaggagaaagacatcattaagtgaattacagctcgtttcatttttatcacctgttctttaacattcttgtcctaaaagtctttcacctctgaggttaaacaatctatgaacataatgtctatgtaagtttgggagaaacgaggagtgatccttattactcccaaaattatataatttttgagaaaatttaagagtagctgtcatataggacatacaggtttaagagtgcagaaaattttactctattcagcagcaacagaacttattttctatttacttatttaattcccagattcagaaacacaagagtgaaaaataaaagttcaaaacttaagctctcacataccttgagggggtcttatcccacctgcaacaggaaacatgaagctgaaaacagaataaaaatacattataatcttcgtatgtacaaagatttcaaataacacgtgtacttttttatatggataaaagacttgtagatgggacctggtgtttgttctgcaccacaatactgaattgcccaacatcagtacactgagcatccataggatgcatgtcagcatgctactgcagacggaaacttgttgaaacaaaagacagaagaccctgaaattagtcctggctctgtcacttcgtgtcctctctggattccagtttccccatctataaaatgagagagtttagattcaattcagtcaacatctattgagtgtcaactacatgaaatgatggaatcttataatcaaaaatacacatatgcaggcaaataactataccacagggtaaatgtgctaactgctataagcgaggtccaaattattaatagagatgagaagaaaaagatgaattttaatgggctatatcttgagaagttttatggaagtagctctggagctgaatcttgaaggaaaatagaagcacactatatattttgagcaaaagctctgaggcagagatgcagggatgtttggagaaatgaatgtaggttaaatgttaactatatgatttaaaagcaagcagattgtacagggcctttatttttatttttatttatttatttatttttgtgagatggagtttcgctcttgttgcccaggcttgagtgcaatggcgcgatcttggctcactgcagcctccacctcctgtgttcaagcaattctcctgcctcagcctcctgagtagctgggattacaggcacccgccaccacgactggctaattttttgtatttttagtagaggcagggtttcaccatgttggccaggctggtctcaaactcctgacctcaggtgatccacccgcctcggcctcccaaagtgctgggattacaggtgtgagccaccgcacctggtcaagggcctttaaaatgtttcattttattttgaatattatatgaagttgtcagaggttttattgttattgtggtaacatatacataacataaaattctatcatttttaaccatttttaagtgtataattccatggcataattaaggacattcacaatattgtcaaccattaccactatccatttccagaacctttccatcatcccaaacagaaactctgtacccattaaacaataagtcctcattttagagcgtaagaaagctctcttctaaggttttttttaagctgacaactttatttttattttatttttttgagacggagtttgctcttgtcgtccaggttggagtgtgatggcatgatctcagctcactgcaacctccgcctgccaggctcaagtgattctactgcctcagcctcctatgtagctgggactacaggcgagcactaccaaacctggctaattattgtattttcagtagagacagggtttcaccatgatggccaggctggtcttgaactcctggcctcatgatctgcctgccttggcctcccaaagtgctggggttacagacatgagctacggcacttggcctaggctcttttgaataaaggttaagcctgggcgacagagtgagattccgtctcaaataaataaataaataaaggttaaaaagttaagctctggccaggcgcagtggctcacgtctgtaatcccagcactttgggaggccaaggtaggtggatcacctgaggttgggagttccagaccagcctgaccaacatggagaaaccccatctctactaaaaatacaaaattagctgggcatggtggtgcatgcctgcaattccagctactcaggaggctgtgaggcaggagaatcacttgaacccaggaggcggaggttgcagtgagccaagatcgcgccattgcacttcagcctgggcaacaagagtgaaactccgtttcaaaaaaaaaaaaaaattaagctctggttgtagatgaaatagccaagggcatatatccagtaacaaaacaactaaggacaaacttggagaattcttgcagtgaaaactgagtaggaaatggtcattgaaaaccaagggagtgcttataactgagagttataactgaagaaggaccacatttcaacaaggaagtagttaccagtgtctaatgctgtagaatagcggtgagaatgaagattaaaaaataaatcactgctttcaaaaatggtgattgttaagtgagttagtttcaacaaagaaaggggaagagaccctagggagaaaaaatttaagagacaaaatacatacctagtgatttataaggtttttaaggaaatgggattaacacgcgaaggagcaaaagggggccagatgaggtggtgcatgcctgtaatcccagcactttgggaggccaaggcaggcggatcacttgaggccaggagttcaagaccagcctggtcaacatgacaaaaccccatctttactaaaaatacaaaaattagccaggcgtggtggcatgtgcctgtaatcccagctatccagtaggctgagacatgagcattgcttgaacccaggaggcggaggttgcagtgagctgagattgccccactgcactccagcctgagcagacagaatgacagaaggagactctgtctcaaaacaaaacaaaacaaaacaaagtagcaaaagggatctgctttgaaaaggaagtgggacttctttctctgagcctggaaagaaaaagggacaaatcaaggaagacttctgagtgagaaaggctcttaatccgggagtcaaggatctgaaaaggaggtttctagatactctttagagaatctagtgaatggctgggtctggtggctcacacctataatcccagcactttggggggccaaagtgggaggattgcttgagcccatgagtttgagaccagcctgggcaacatagtgagacctcatctctccaaaataataataataacaacaacaacaacaataaataacataaaaattataatggtgattcttttccagaaagttttcaatttactgtgtccagttccatcaaaagaatcactatctatgggcgttatagccttagatatagccttacaatgaatttctcaaataataagagatgaaagaagaaattactccttgattcatggagaatggatgccgctttagcagacatgagaacattaaccttctcatgcattgccatcagagctcttgggtgaccaggcacattgtcaagaagcagtaacgttttcaaaagaaacttttttctgagaagtaggtctcaacaatgggcttaaaatactcagtaaaccatgctgtaaacagatgtgctgtcacccaggctttgtggttcaatttatggactataggcagagtagatttagcatacttttgaaaagccctgagattttcatagtggtcagtgagtattggtttaatttaaagttacctgctgcattaggccctaacaagacagtcagcctgtcctttggtgccagacattgacttctcctctctagctaggaaagtcttagatggcatcttcacctgcattgaaaatctggccaggtatggtggctcatgcctgtaattccagcactttgggaggccgaggtgggtggattacctgaggtcaggagtatgtgaccagcctggccaacatggtgaaaccctatttctactaaaaatataaaattagcctggcgtggtggtgcgtgcctgtaatctcagctactggggaggctgaggcagaagaaccacttgaacccgggaggcgaaggttacattgaggcgagatcacgccactgcactccagcctgggtgacagagtgagactctgtctataaaaaaaaaaaaaaaagaaaatctattgtttagcgtagccaccttcatcaatgatcttagctcttctgaataacttgctaaagcttctacatcagcacttgctgcttcaccttgtacttttttgttatggagatagcttctttgcttaaacctcataaactgacctgttagcttccaacttttcttctgcagcttcctcacctatttctcagccttcagcctttacagaattgaagagactaaggatcttgcttcaaattaggctttggcttaagggaatgttaagggtggtttaatcttctatccagaccactcaccctttttcaatatcagcaataaagctgttttactttcttaacatttgtgtttcctggaataggacttttaatttccttcaagaacttttcctctgcattcacaacttagttaactggtgtaagaggcctcgcttttgacctacctcagctttcaacacttaatgactaagctttatcatttctagcttcggatttaaagggagagatgggcgactcttcctttcacttgaacacttagaggccactgtagggttaatcagcctaatttcaatactgttatgtctcagggaatatggaggcccttggagaggaagaccggggaacagctggtaggtagagcagtcagactgcacaaaacatttatcaattacgtttgctgtcttatacgagctgggtttgtggtgctccaaaacaattacactagtaacatcaaagatcactgatcacagatcaccataacaaataataataatgaaagagtttgaaatattgtgagaattaccaaaatgtgacagagacatgaagtgaacacaggctgtggaaaaattgcgcggataaacttgctcaatgcagagttgccacaaaccttcaatttataaaaaacactgtatctgctaactgcaatgaggtatgcctgtattcagtttttaaagacattactcatatgctaaaattgatacattcaggagcaatgaatacatttaagtaatcaagctgtcaagatttttaaaaatcaggcttaaacatttaaattagtcatatggcctagaggctcaaaagaattggaaactcgtgtatattttctttcttccagctttgccataaagtaactgtgaagctctgtgcaatctcctttaccccctgtctggtttcccctctgtcaaatgaggacgtagaatcaaggctgctaaagtctcagctaagacaatcacatagacatgaatacataaacagatgtataaaggttactttgaaaatgaaataaaaacaaaatactgtcaaacatgactttctctagtaagaatttagcaaatcgaactgcttagtgacctatgaaaaattcatatttttctctgaaatgtttagacaactaataacaacatgcttaaagattggttagataagcagttaaggcattaataagacagtaaaagcttggcaaaaaactgggcaggaaggtgaccaacaatttaatttcaaaggtaaaaccactaattcttatattactgacatctcggtatgaaagcagagctctgtcacttacctatctcatccgtccctccttttcagttacctttgctactaacctagatttgacactaggcttcacttcttaggcctaaactcctacataaagacttcctaatggatctccccacctccagactctggtttctaattcatctgatgcagcacaagtgagagacatctttctaaatgatggaccattacgcaataattaaatggtcctttagcaagacgcacccctgaagttaaaactatgaaatgatttccctgaaactgaatttccttagtttaaactcaaggccctctctagtttgggcacaactctactttgcagttttatctcacaaaactcttctctgccactcagagccacagtcatctggcactgcaggtacatcgtttccttagtgttgactaggccttcccatctctgtgacgatctcttgaccgcttcctcttcctctaactctgtgggccaaatgaaataccacttctttgcctttgatatagctgaaatccacaaatatttacagaatgttttttatgtgcaaaaatgtgctagaagcagtgaaagaagaaaagatgaggaagccctctaaaagcttgtaaaagatcaggaaaaaatagacaagttcacagatgataacatcccagaagaacgtgacctctttgttccactttactttgtaccacagttattttgtacattctccaaggatggggaccatgttttgatgtctttttaattcattacagcatcaagaacagtaccttacccatgtaagcattcaatgactacagactaatccagatctttcaactcttttttttttctgccttgattaaagaaaaaaaaaatttatacttctcatctcttgggcaaattttgccctttatacaactctaccatttattctaaagtagctcatccaggacaccaatcaaaagtagggtaatattaaatttggaaaacgttattgtgttttgcttagcctcttagaatatagagaagtatctaaacaatacagtcagttatagttcatggattttctccattaaaggtgtagagaagttgcctgttttttttcttcaaatatacttaggttgccataatgttaagtttccttataaaataatttcagggagggtgggtggcaaaaagaaaattaaaaaggaaataaaataacttcagcctttacaccattactctctaaaaaaaataatattcctttttctattgaggatacagcttctcagcctcagaaagttgccaatatatgtaacatatgtaccatacatttttcaaggtaagaatcattttaaccacttctttctctcctgtatatcgtttacagttttagaatgcagatgttgctacatttacaaaggggggaaattttaaaatcattctaatttctatcaaaattcaacccatatttattttaaaaatttgtgtccatggaccaatgatactcaaatactgcaaactaaagggaataatgcacttgaatttctgaacctgaggtcctccccatccaaaaacattttttaagtaaataaaaatttgggcctagatatcaattcttctaagtttacattttcccagaacttggtgccatgattaatcatatacttgatcaaattaataccatccagggacattttagaaactgtaatcacatataggaaataaatagaggatgccgggcgtggtgactcaagcctgtaattctagaactttgggaggccaaggtgggcggatcacttgaggccaggagtttgagaccagcctggctaacatggtgaaaccccgtctctactaaaaatacagaaattagctgggcgtggtggcgcacgcctgtaatcccagctacttgggaggctgaggcagaagaatcgcttgaacccgggaggtcgaggttgcagtgagccgacatcgtgccactgcactctagcctgggtgacagaacgagactctgtctcaatcgatcaatcaacaaaattagccgggcatggtggcgcgcacctgtaatcccagctgctccgaggctgaggcaagagaatcgcttggacccaggaggcagaggttgcagcgggtcgagatcacgccgccgcactctggcctgggcaacagagcaagacttcctctcaaaaaaaaaaaaaaaaaaaaaaaaacaagacaaaagaaaaagaaaaaacaaatagaagggaattattacatatgtttcttctccagccagaaactggcttacacgaagtatttattttttaaaaaaccctctaatgaaacaacggagagaacaaaagagaaagcaaaaagtttaaaaatctaaagttaaagatgtgcagaggaaatgaaaaatggggttacacacaggtggtttattgaacagccactgctcgtttcctgacaagcacctgcaagaggtgataactttaaggtccttacacttttgtagtgttcacgactccgaaattgaaacactgcatataaaaaaaaaacctaacacttcgttttccaaagacaatttaggatactgaagatgcaaagctacttttacctccaaatgtgtgtgctgttgtgtgttggttagtaaaacaaaatcagactaggtcattatagaagtggagtgaaaacttcctagaataaaatatttccttaaatgataacgaatctgtcagcttgtaaaacgtacatctcccttaccattctgggtataagaaccacggcagttcttggctgaaatgtggcagagggcagatttgtttaagggctgagtctggaagctttgttctaataaatgcgcaactgctgtttaacagtgcactttctttgtttttaaatgcctttttaaaaagaagacagacaagtcttaagagttagtgtacaagacaagaactctatctcaagaccattactaattcagaggtctttagatgttcctgctgtttgtcgcgggttaaggaaataaagaggacaggacactctaaaaggggaagagacaaatagtccacacacacaccccccttggaaacagtcctccagctttgtgaacagatttttaaagccctccctccaacatatccggttaagtctagaaagcccaaggaaagggaagaccctggtcgcttcagaggcagctaggactaggagcggagtcgcggttcctgatttgccccgcccccccccaccccaagaggaccctcatcttctctcccctcccacactgggcgcgcgctcgctccccgctcgattccaggcggccggcgcccccaactgatcccggaacaccagcgtccagcacctgggctccacacgcccctttcggcctgggtccctgggggatgaccctcctcccgcagcccagttccaaggaaaaggatcagggctggagaaaactgccataactgccaagcgcccctcgccgcccccgcggaggccagcgggctcccgcccggctcttcacacctacccgcctcccccggcggaccccgcgccagctcccgcggccccgccgccaccagaaccagctcctggccgcagcgccatcttgctcccgacctgccgctgccttcgccgccgccaccttatcagcagctgtcagctgaacacagccacttccgggtcaaacaccaggccccacctcgccgcggaccgggcgatggggcggggcctcgcgcccacgtgactcccccggccctcggggaggcgtggcgcgcccacggcacgtgacccggcgccgcaggggtcccccagattcaattctagctctcgggctggtggggcggtcgcgggcgcctctccaagggagctgattcattgtctggtaggccctctgcagggcccagctggcggcccagtggcaaagcgccgttggtcctccgtttgaaaaccatgatcgcggttagtggaaagagtaggctgagtcctgatttttaaactatacggtgggtacactggtgttcttttattgttactctttacacacaaagaacagataggtcctgaagggccctttgatagtctcgcagcactgatgagtgatcagctctcccctctttctctggaactcggtagcttcatgttggcacctatcacagacgctgaaggcatttaaattttattttaaatcaaccaagagcccaaaaacccaacccatatttcgaaaaaactccaaggtgtactactcttgtttggttctgccatcctgccaccttacagtccttttgtttttcctattcttgcaggcaagtgcaaaacagtggtttttggaaggcaattcataattactctgaagctatttcggcatattttttactgattttttttttttttgagacagggtcttgctctgttgtccaggctggagtgcagtggcatgatcatggctcacagcagcctcagcctccctggctcaagcgatcctctcgcctcagcctcctgagtagctgggaccacaggcatgcaccaccacaccgggccaatttttttttttttttttttttttttttttgtagagataggatctatgttgcccaggctagtttcaaactgctaggctcaagctatgctcccacctcggcctccaagtgccagggtgtgagccacatgcctgggctgtgatttttttttttcttttaatcaaactactgtctggaagtaaaacatgaaagttgagtaattttctcaagcacgtagtttgcttgctaacaagtaatggattaattagctttacgttttcactcttgtctcaaggtttttactgggtaataatttgtaataagttattaggcacaaaccactggtcaggaactgtacacgcattttaaaaaatcctcagtatccttaggagttacaattggcatcttacagatgagaaaatcaaggttagaaacagttactgtcatttgtccagatcatacagctacaagcaatgaggatcaggattcaaatccaggccagtttgactctaaagtccttgctcatttcaccagagccagctattcaatttttatgttttttcttttgctgtaactgcctgttcactaatttcactccttcccttccttgtgtgaagctgaaatttatgtagcacatagttccaactgctttgaaggagctaaatttagtattaatacactgactaagttgatacaggttactgtagatactttaaacagacacaataaagtcaaggatcatagatgtgacctcagtttgtcctggaatcctttttgttcctcttctttgcctattggtttttacatttgcaggattcaactcaggatgtcggccttccatgacatccccaatctgggttagatgccctcttgtgatgctttagcatcatggccttacatctaacagagcacttgccacactagtcatgtgctacatgatgatgttttggtcagccacagacagcagatacaatggtgggatgagaagtgggggtggaagacagtgagactgatgatcctgaccttttgtatgcctagcataatgtgtgtgtttgtgccatggtttttaacaaaaaagttttagaagtaaatagtaaaacaaaacaaacaaacaaaaattaatagaaaaaaagcttctagaataaggatataaagaaataaagtatttttctacagctgtacatttgcattttaggctaagtgttatgacaagaatcaaaaaagtttataaaggccggatatagtggctcactccaggtcaggagtttgagaccagcctggccaacatggtgaaaccctgtcactaaaaatacaaaaattagctgggtgtggtggcgcatgcctgtagtcccagcaactcgggaggctgaggcaggagaatcacttgaacccaggagtcagaggttgcagtgagccgagatcatgccactgcactccagcctgggcaacagagcaagactccatctccaaaaaaaaaaaaaaaaaaaaatctaaaaaacccaactggacaacaagcaagacctcgtctctacaaaatttaaaaattagctgagtgttggtggcccgcacctatagtaccagctactcgggaggctgaggtttgaggatcacttgagtctaagaggtcaaggctgcagtgggccatgattgtgccactaaactccaaattaggtaacagaccctgtttctcaaaaaaaaaaaaaaaaacaaaacaaaaaaactcataaagtaaaagttacagtaagctaaggttaatttattgaagaaaaaatatatatctaatatatataatacataatatatataatgtgtgtgtgtgtgtttattttcaagacagtcttgccctgtcgcccaggctggagtgcagtagcgcgatctcggcttactgcaacctccgcctcacaggttcaagctattctcctgcctcagactcctgagtagccgggactatgccaccacacccggctaactttttttggtattttttttagtagagatggggttttgccatgttgcccgggctggtctctaaactcctgagctcagacaacctgcccgcctaggcctcccgaagtgttaggattacaggcatgagccactacgcctggccaagaaaaatattttcaataaatttagtataggttaagtgtgcagtgtttatacaagtctacatgttccaactgtctatagcatgcaggacagtaacatgctatacgggtttgtagcctaggagcaacagactataccatatagcctaggtgtactggtaggctataccatctaggtttgtggaagtaaacaacatgatgtttacacaatgacaatatcacctaacgatgcatttctcagaacatatctctgtcattaagtgatgcgtgactctatttgctcctttatctctaacattacattgtaagggtaaggactgtgttatcaagcctgtattcctaacaaaatctatgtttaagaaatatttattgtgagtttactatgtatcaggtacagtgctaggtactcacaattggagacataattttatagatgagaacactgaaactctgagaaattaagaacttactcaaagtcacacagctggcaaatgggttgcaccagtatacctacctccagaatatatattgggtaaaggatctgtttgcatgaacaaacaaaaaaatcatattcttgtaagtatttttacaccctgtaccagtagatctttctttaaataaattccgaagatgaacaatttttgtcccatctaaaatattcaaagcaaagtccacctgttctgactctagaacaaaaagctacaaatagaggaaataaataagttgaattcaaatgctgctgagaaaaggcaatgtatattatagttctgtggtagtactgataacattcaagtcattcttaggcaccagtcttacgtatatgaagtcactttttcattccattgtacaaaactcatattttgagaaaaatctaatagctaatagtctccaacaccatatgatcataatcctttagcttaagtagagatctacttattaaatgaggcaccatcaacctaaggaaagataagctgtaagagaatgaagacagaggtatatcaagtaacaagaacattcttccttatcaggataaaatgtttatcagtattcaaataaaatatcttaaatggaaagagacaggaaagaacatggttaaatcacagaaaatgaagaaagggagaagctgatcatgatcttgtacaacattatgacagcactaaggtattacgtatccaatacaaggatacttaatagaccaaagaatttaaaatcccagggaactggaataaccagccacaaaagaggcctctctttgttgtggttcacaacacaaaaggccatcaacaaattaggaaatattaaaattaagagagcagcaggtttcttcttggtagacagctcatgctaccatccacaaagtgagcagtggaaggggtatttaatgtcaaggctttattttgaatttctgttccagatgcctctccacagcattcatcacaccttccttcacacttgaagggaaaagtccttaagagttcaccacattttggtgttatttttagcataaacatttgtttttctataagaagtatctctctggattcaaaccacagaaatgtcaatgaatgttatttccattgtataatcatttaaaagtcacctacagagctgggtgcagcagcttgtgcctgtaatctcagttactcaggaggctaaggcaggaggattgtgtgaggtcaggagttcaagaccagcctggacaacatggcaagaccctcatctctacaggaaaaaaaaaaggcacctacaaattgaaactgacttgatagtttaggatcatttatcaccagtcccatgtacttgtagttgatttcaaatgtttggtacaggtgactgtaagacttcaagtattccatgaaaataacattcatgctgggatcataaaattacatttctgggacagtatttttaaagtctgtttttaacttttgtcttcaagagctactttcttcttgctgttctgaccagtgacctttttcctgtaaagagcaaagtaagaaaaattgaataaaaaattctacgtatatttactttccataaccctaccaccagtttaataaacatttactgaaacctactgtgtatcaaataatgaggcactaggaacacaaagatgcattagacatggtctctgccctttagaaaatcacaatcacctaagtgaggcagaaccatcacagtaaactacattactacatggtatgacacataggttcggatcctgacctaatgagttcacaatgattcagtgcttactgcatgctagaaacggttactaagtgctttacatgtattaactcgggtaattttcctaacaacttatgaggagtattgtattattatcctccgtttacagatgaggaaaatgaggcacagagtggttgacttgccagtcatcactcactggtaatccatgttagacacgaatcctatcagtctgatcctatagcctagtgaaggttgaatgtcattaactaagtggtaacagacaaaggaaaaaagttttgagaaaataatcaatgtttgcaaactattattatagtaatacaaagttctttggtgtatattaactcatataatcccaaatcccaactctacacagggaagtagatattagaaccagttcttctggctccaaatccagttcctccccgactcactgcatggggctgagtttgtgatgcctgaagtgaggtccactaggcagcaaggattcaggtttgtagctcaatggggaagttggggctgaagataacaaccttaagagcgatcagcacagaaatatgagctgagcctataggcatgggtgggatcattaaggaaacatctatagcatagaggtaagccagagttggatcatgatgggtcttgcttgtatgctatgttaagtagtatggcctttacatatgaagaaaatggagacacaaccaaagcaccttaagcagggggctgatatgacaagatttatatcaagtgtcttcgaagtcttagtacaaattaagttttaataacctcagaagaaggcaggtgcagtggctcatgcctgtaatcccaccatgttgggaggcagaggtaggcagatcgcttgagtccaggagtttgagaccagcctgggcaatatggcaaaaccccatctctactaaaaataaaacaatattagccaggcacggtggcataagcctgtagtcctagcttctcagggggctgagatgggaggactgcttgagcccaggaggtcgaggctgcagtgagccctgattgtgccactgcactccagtctgggtgacagattgagaccctgtctcaaaaaacaaacaaaaaaccccagaagtataaatgctataaacttataaaaatcagcatttagactgggcgcggtgggtcatgccttagcactttgggaggccgaggcgggcggatcacaaggccaggagatcaagaccaccctggccaacatggtgaaaccccgtctctactaaaaatacaaaaattagctgggcatggtggtgtgtgcctgtaatcccagctactcaagaggctgaggcaggagaatcacttgaacccgggaggtgaaggttgcagtgagccgagatcgtgccactgcactcccgcctagcaacagagattccatctcaaaacaaaaacaaatcagcatttaaagtataattatttaaaatactgatgtatcttattaaaattcaacatagccaccatcttatgttctagttgatttttgacctttgtaaaaactttcatcagttgctgctcagtgcctgaaaggactgcatttgttatcttggctttaagaccatccaaagagtaacacatacacaacagttctgatgtgacccactcctctcctaccaacaagtctattaagacagattaggtgaccaaagtggccaagcataacaaggttcgctaccaatccactggtctaagtgtcacccagaaactgttgcgacagaaaattaaaatttaaaaatgttggccaggtgcagtggctcacacttgtaatcccagcactttgggaggccgaggtgggagatcacatgaggccaggagtttgagagttcgagaccatcttggccaacatggtgaaaccccatctctagtaaaaatacaaaaaaattagccaggcatggtggcgggtgcctgtaatcccagctacccaggaggctgaggcacgagaatcacttgaacctgggaggtggaggttgcagtgagccgagattgcgacactgcactccagcctgggcgacagggtggcagagcaagactccatctcaaaaaaaaaaaaagtaaatgtgattgtgaagcattcccaaaactgaataagtacaaatggaatttgtacttattgattgattgactattcaaatatacttttttcagtttgtagcacttatccttcccaagttattaaaagtatgataaaattttgagacactatatatacactgtatatttgaaccgacttttattcctcatagacaataccaacatgtgaaaactcttgttcacttatttacaaagcacactctaattttcatgcctctattcatcttgttcccttctccatgcctaaattttacctatccttaaagatagttctactttgttgaaacttctgtaaccacaccaattcacaatcatctttctcttatctcctattttatttaaaagccagtctctaattttctgtcatgtacacgaatcttctttacctaacttcaggaaaggatctcattttatattcatttgtatacactaccaccaccaagtaccttgcagaacaacttggtaaatgcctactggttgatggaaacagtttttttctaatgacttctatagaacagatgtgagataactggatataagcattagcatatttcacaatggtaatatcctaggccattgatagcactctcaggggagaaaaaaacaataaattatagacttgaacaattctattagagtatataataacctggttctggtagaatgtgaagagtgccattttccttaaatagtggatagagtataactgttcaaaatatcttggcctatccttttcaaaatataaagcttcctagtattactgggcaaaataaggtagcctgtatgaatgctaaaaaactatactttaatattctcataaaactcagctaagctagcacaaatttacctaagtaatacttcttacaggtgttacaatgtgcatctgcgtaagcctgagatcatattgaaatcctgcccagaatatggagcttcaaagaagactagatccatgtaagtcaatggtcctaactattggccttagtagcatgtcctaatgtgggctgtgtagagaaggtgggcagtataattcgaatttatagagaattgaaataatattttccaagacggaaaaaaacagatcatcaacatattggtacagaaaaattccaatattaaaacaaattcctggctgggcatggtggctcacgcctgtaatcccagcactttggaaggctaaggcaggtggatcacctgagctcagcctggccaacatggtgaaactccgtgtctaataaaaatacaaaaaaaaaatagctgggtgtggtggcgggagcctgtaatcccagctatttgggatgatgaagcagtagaatggcttgaacccgggaggcagaggttgcagtgagctgagatcacgccactgcactccagcctgggcgacagtgcaaaacactgtctcaaaaaaacaaacaaacaaatttcccaattataggcaacctaaaatatattatttttataacgttttataacagactgtagtatcaattctacttctaaaaatttacctaaggaaaaataatgcctactataactttatgatggtgtcaaacagccatttttcttaccacatacttactgtttatccttagctttttctaagaaacattttggagttgtactaatgctctccctttccaatggtttcttaatcatctttttcttttgtttgctgaaagttacaaagtaaaaaaggaaaagaattaagtgcaacttcaattagaagagttaaagctaaaattagttttgatccttgatcacaaaattcattttttttttttcctttgagacggagttttgctcttgttgcccaggctggagtgcaatggcacaatctcggctcactgcaacctctgcctcctgggttcaggcgattctcctgcctcagcttcccaagtagctgtgattacagacatacaccaccacgcccggctaaatttttttttgtattttaagtagagatggggtttctccatgttggtcaggctggtctcaaactcccgacctcaggtcccgcccgcctcggcctcccaaagtgctgggattacaggcgtgagctaccacgctcagccacaaaattcatttttcaaaaccatttactggtttaaggtggggctgtaactactttaataaacgagatcgcctaataggatttacagagctaactcaaagggatgataaattcaatcaaccttttagaaagctactgactgtgattaaaatatgtcctgtgccaaccttatatcctgtgtcaacaagcatcagagtttgattttgatcaattaagttttttaccagctttatgaactaaaataattctcagcatattttacttatactgaatacttttaaaagaatctgaatacttcacatttcaaggataagcctaggtgcagtagctcatgcctataatcccagcactttgggaggcccaggtgggcagatcacttgaggtcaggagtttgagaccagcctggccaacatggtgaaaccccatctctactaaaaatacaaagattagctgggcatggtggcgcacacctgtaattccagccacttgagaggctgaagcaggagaactgcttaaacctgggaggcagaggttgcaatgagctgagacttcatctcaaggaaaaaaataaataaataaaggataaaaaactggcaaggaaataacatgtaatattcacaagcagttttggactgggcacagtgacacaagcctgtaatcctagtacttcgggaggcaaggatataagatagcaagatcacttgaggccaggagttcaagactagcctggttaacacagcaagaccccatttctactccccaaaaatctaaaaaatattatagccaggcatggtagtacatgcctgtagtctcagctacttaggggactgaggcaggaggatcacttgagcctaggagatcaagactacagtgagctgtgatcatgccactgcactgcagtctgggcaacagagcaagaaaaaaaaaaaaaagaatgtatatacaaagagacagacaaagatacaggtaaattcaagattgtaccttagtagtttctgaaaaccttttatgtattctggtacaggacacccagcctgctgtataacattagcaacgctgaaaaagaaacccataaacataaacttgtatctttgctaaattgatgtttatgaatgtaaaccctctgcacaaccttacagggaactaaaactacacaaagtaatccacaaagtgttctgatatattatcaattattacctgatgtaagcacattggattacagagagaactatccactgggctgaaattaatgcactgatgaataactatagatagcagctatttcaacatttatcaagccctacaaaactggtaaactcaatcttggaggaagcactgactgaagccagagtcaagcttaaattcattaagtgaaagtgcctactatggggttggcaccgttgccaagttttttgtgtatagtaacttcttcactcttcacaacaagcctgtgttgtaaatactatcactgtcctcatttcacagatggaaaactgaggtgcatagttttacactaatatttgggtcatgggattcacatgcttggagttgctgaggcctatggtggatctaggttgttggaatatacccctctacacacgcacatttgaatctgcttaaagcgatataaaggctgacaggtggcagagccaaagctcagaaagcacaaccaaaatatttaccaaaactgataaacagatctaagtacaaacctcctttggccaaaactagattagctagaaatgtgaagtgttaatcatcatcaaccaaaaattactataggcagtcaaaatgcaggaaactcatcttctacattaaaatctaacatcaaccattgaaagagtcctgagtctgaaacttacaatgaacattccattttgaatatgtatttccaaattctaataacggaagggcaaaaacaaggccttttgatcatttttcctttcccatggctaaaatttggtcaactaacaccattatcagtagaatttgggacatagccattttgtaattatctcttaattgaatatacatataagaataatgaagcaattttgccaataacactaggttattttttctaatttaccttcttaataatggcttatcatcctcagtgaaaaatgtaattgcttttcccttattccctgctcttccagttcgacctaagaaaaattagaccattaaaaaacacattttggggggaaggaggctctcaaaattcatttataaaagtcactggattttcacagcactaagaagtgagcatatgtgcagggaatagcaggggtcctaagacagatcagtgggtgacagaggggaaggaaaaaaaagacaactcacctatcctgtggatatattccactgagctagttggaaagtcatagttgatcaccaagttcacacctttaaaatcaatccctcttgctagcaaggctgtacaaatcagaacccagatttttcctgctctgaaactgtggactgtgttatctctctggttaacagaatatatattaaattgttttagaatgaaaacaggtacttcataaatttaatgtcaatagtttaaaatcaagtagttcttctgagtttcaaagtatatatttgactttacctgttgttgtgttctctctgcatgaataacatccacattaataccttcatatatgagctcatgaaaaagttctttagccctttcaatggactgaacaaaaacaagaacaggtggattgaaaccctaaaagaagacaaaaattggcatacataactcaatcaagaatacaattggtcattatttcataatttgattgtagcttttaagaacccaattcaatttagtgtactttcttggccaaatttcttgggctagtggtctaattctgcctccatcttcgtcaccattctctccaattggttatttccactcaacttgaaatatattctccatcttgctaattccaataatgttgtctaatcaatccccctacaccccactatggtaacagatgcctcaactttgaaataatcatctcttgacttctgtgcctcaaaacctttttttattctgcttaaaatgaaataattatctttttaattcactgggttttttggggtgaaattaatttttttattcttatggatttaggggtacaggtgcatttgtgttacacagatatattgcatactggggaaatctgggcttttagtgtacccatcaccccaatggtgtacactgaaccccacaggtggtacttcatccctcattaactcattatttatcctaactctggtgctctccccaagcttagtccttggttctcagttctttcaatataatctttattttactgagttgaatctctactactatctctaagtaaacattttttttttactacatctgatgtctgtgaatctaaacaaattatttttacatttacactatcaaacccttactctctctcaaaccagctatctttttaaccgttcatattagagtttcttagcctttttttttcttttttttttgagacagagtcttgctatgttgcccaggctggaatacagtggtgcaatcttggctcactgcaacctctgcctcccaggttcaagcgattctcctgcctcagcctcctgagtagctgggattacaggtgtgcaccaccacgcctggctaacttttttgtatttttagtagagatggggtttcaccatgttggtcaggctggtctcgaactgctgacctgatgatccgcccgcttcggcctcccaaagtgctgggattacaccggtgagccaccacgcctggccgagtttcttagcctttttatgatggcttaaacatctcttttggaatctaatgaaagctaagaaactttctaataagtaactactcattcacacaaaaatcttacgtataattttagagggtttgcagacctcccaaagctcaaacatggctgaaaacctctggtgtataatctccaaggaatatcctggaaaaccttaaatttcctagtaccaaatgattctcttaagaatattaataaaatacatttagcatttactatgtgccaagcactattatataataagtactatgcttgtactaatgaattaatagtaaaacagctctatgaggtagatattattatcccattttacagacaaggaaaatgtggaagagaggttaagttgtgcaaagctatagtggtggagctagaactacccaagtagcctggctcctgagtccatggtcttaaccactaaagcaaaccattctatagtcaccaggtacttgcaaacttttcccttctagcctccaactatacttaatgtctcaccactaaggctgctgcccttatttcttcctcatctctgcctaccccagtttaaaagcctgattggtttccttactttccatctttcccattacaattcaccttacatattactgtttaactaattttccttaaaaattatgtagtcacaattagccgggcatggtggcaggcacctgtagtcccaggtactcgggagactgaggtaggagaatggcgtgaacccaggaggcagagcttgcagtgagccaagatgacgccaccgcactccagcctgggtgaaagagcgagactccatctcaaaaacaaaaacaaaattatgtagtcacattcttcaaaaatatcctgaccccagctttcctgtcccacctggttttctttaattccataccataaactgtttgccttagacaggtaactgcttcattagtcttcaaacacatggtgttcacttccacctcttaagggtttactcaagctgctcccccagccgtcaatgctcttcccctccacgttttatcctgaaaatccttcaaggatcagtttagtagcatttcttctataaggctcaaccaatttggctcaccctggtggccccattatgactatatggatgcttaaaaaagtactctttagccctttatgacactttatcagagactatcttacacaagtgtatttattttatccctctaaacaagactaaattccaggggcagggcttaggagatttcttgtattgtccagtgctgacacctcagtactttttaactatggtttctactcagttcttactgaaaggataaaaacagaaaaccccactcagtgtcctacaacaccccagttcttctataagaaaccagaggagggatggagcaggcaaatgtggaaaaatgagattctcagggcatcagatagatcgtttcctagcctaatctgagctgcgaaaagacaacttaccatattctgagaggcaagcttctgtcccttgggataagagctgggacaacacgcttcttaaccatttactcctagattactaaatacgatgcaggatgatcatatagttagcacaatgtactttcttatcaatttaccaatggattactgaatacgagccaagatgatgatgatacagtgctaccactgtaatagcctcccactagtaatataagacttggcaaactttaccaaaattcaagaaggtaatacaaatatacctttttaacaagttctctcacggccagaagttttccggtctcagatccaacaaagagaagctcttgttctacagtttctactgcagaattcctgggaagaaaatataccttgtagtttgtaagagttaatttttgctttttcccctgaactctaaataaatgaaaaaatttacacacaactccaacaaaatcaatttttccactgtcaatattaataagtactgaattatttatactttaacttgaagacaaaattgttatttttaaatgctttcttctaattttaaaaatatcttgaaatgccacccattaaaacttatgtttcagtcataaattttcaggtatttgattagttataaaaaatttctaactgtaaaattattgagtaaaataataaaaatatttttaaggttgttattacacatggttaaacatttttcataatgattagcaaagatttatttatagaccaacagttaggggtgagatatattaagactttattaatactctgtaagatgttacaatgtactgtgttgtatcataaatatttttcccatttaattatttttatctaaatatatttaaatatacattaaccatatttaaatatgtttaatttcccattgaaattatgtttatggtgaattcattctgctttcctgttttttttgtttttcaagatggaatctcactctgtcacccaggctggagtgcagtggggcgatctcggcccactgcaacctccacctcccaagctcaagcaatactcctgcctcagcctcccaagtagctgggattacaggcacacacccatttttgtatttttggaagagatggggtttcgccatgttggtcaggctggtctcgaactcctgacctcaggcgatctacctgcctctgcctcccaaagtgctgtgattacaggtgtgaggcaccgtacccaaccttgctttcttcttataaacaggaattttaggtttaaaatagggtattctttactgttccattggctactttttcacttaatatggtactacaaacactttttcatatagctacagtcttcctacatcatttcaggggttacataataatccatcaggtagcagtatcataatttctttaaacttttttctgtcactgagcatttatttagcataaaatgctccccaaaatattttttaaaaggaaatatatatcaagtggctcagtgacatcaggttcttcctctgtggtccacttatttaagccatcaaagaaactaaatcttctaggtggccacagagctcatgttatactctgtggatggaaaaaaacacctaaaagcatgatgacaggaatgttaatatgacaatgtaaaaaccttcttttagattactctaaaatagaaaatccttaaacaatcttggcttaaaagaacacatttcaatcagtaaaactctctcccttgctagtctcaggccaagaaacctatctccttcagtctttaaaaaagacttgtatttaaaaaaaaaatcagtgtgataatgttgagaaacaattaaataccttgctccaatggacacactgatgacattgtccaggttgagtttgcaccactgttcaacatcatatgcaaaagttgcactgaacatagctcttcggaccttgtgggatgtgcaggccaggaaaatggaagccagctggtctctgaacccagttttgccatcttcaaacagtttatctgattcgtctactacaagccactcaacactaagaaataacaaaacaacttgtggatactgaactgaaagatccaagacacttcactaaactgtggggacagtggacacatgaggaagtcaaactataatgctgcttctcagatccactttatcataccaaaaaaaaaaaataagaaacacaagcaggtgtcatggtttggctgtgtatccccacccaaatctcatctcgaattgtaatcctcacgtgttgagggagggacctggtgggaggtgaccggctcatgggggcactctctctctctcttccccatctgccaccatgtaagatatgtcttgcttccccttctgccatgaccgtaagtttcctaaggcctccccagtcatgccctgacttgtgggtcaattaaaccttccgttctttataaattacccagtctcaggtagctgtttagagcagcatgaaaacggactaacacagcaggaaaaaggtaaaaggaagataaacatagcttaatgtacctattccaatagcctcaaagatacgaggttccatttcttttctatgaatttttttaaaaaaccattattctcagtgccaacactgactgaaggtggcaaacagcaagctccaaagacaaaaaatacaagcaatagaggacaaaatataattaactaaattaaaaatacacacgaaagacatgaaaatatcatctataccttgctaggtcgattccggggggatcttgctttaataaatagattagtcgatttggagtagtcacaagaatatctataggaaaaacaaatggtagaaattgcaaaaacaggatttatccctcttgaactaggaattaagcctcctcaacttcagttaataacctgaagtgggaagtagtcatagccaacaacacaaaactattatatccctactttccttttaatatatctgagcagctttctctttctttttgagacagggtcttgctctgtcacccagcctggatggagtacaatgtgtgatcatagctcactgcatgcaacttcaaactcttgggctcaagagatcttctggcatcagcattctgagtagctgggactacaggcacatgccactgcacctggctaatttttatttattactattatttttttgagacagtctagctctgtcgcccaggctggagtgcagtggcacaacctcggctcactgcaagctctgcctcccgggttcacgccattctcactcccgagtagctgggactaccactagctgggactacaggcgcccgccaccacgcccagctaattttttgtatttttagtagagatggtaaattttttttttacttttatttttgtagaaacagggtctccctatgctgtccaggctggtctcgaattcctgggctcaagcaatctccctgcctcagcctcccaaaatgccggattacaggcatgagccacaatacccagcctcttctcaatttctaagaggaaagaacaatttaattttcaaatctttttttcccccaggaaaatcattttttttacatggaattttatgcagaggcccaagatttaaacaaaacaaaacagatgaaagcttatctccaagtggacaatgtcaaaaaacaaaaagaaaaaaaaaaaaaatgaaagcagattctctggctgatataagggtgaggatgtaagccgttctttttgttttttttaagatggagtctcactctgttgctcaggctggagtacagtggtgcaatcatagctcatggcagccttgaactcctgcgctcaagtgatcttcccacctcagactcccaagtagctaggactacaggcatgcaccaccatgcctggctaatttttttttatttaaaaaatttcttttagagatggagtctcgctatgttgccaaggctggtcccaaactcctggcctcaagcaatcctcccacctcagcttctccatagctataggtatggagaagattacaggtgtgagccactgcacccagctatgcatgccattcctgtctgccagagtatttccatggcagattaaaaatcaatggtataaatcagaattttttagcctcagcactgttaccactttgggccactaagtgttcgttgcaggggactgtcctgtgcaccgcagaatgtttaacaacatccttggctataggctagtaactacaggctagtagcacttctccccagttgtgacaactacaaatgtctccaaattattgccaaatgtccctgtggtgaaaggtggggggcaagattgtctctatttgagaactactggtatatatttatgtataacttctcagtagagtgagaaggggatcgctttagttcttctaaaattcaaattttatacatacatgactatactttaacaacacttacatagcaattaggatatttataatttccagattccttacatgctctatctacatcccatgtatgaattccttaccaaactttttagatgatttaggtccaaatttcttggctgccactgctgctttgtggatcatgtgtattctgaatcctgttccctcagaaatttttattaactctctgtgaatctaaaaaaaaaaagattaaaaacattagctgctaacatacttggacaagatgtatactcttttacatgattaatgaaataaatctattaccaacccatgaatatctgaaattaaactcataacaatctgtagattaacctgaaatctcagcattttgaaacttcaatgcctaataagattcaataatttcttcaggtggaataaactagttcccagagataaaactaacctattttgtattgttttcagaatacagtactactggccgggtgtgggggctcacacctgtaatcccagcgctttgggaggccaaggtgggtggatcacttgaggccaggagttccagaccagcctggccaacgtggtaaaaccccatctctactaaaaacacaaaaacaattagccaggtgtgatggtgcgcacctgtaatctcagttacttgggaggctgaggcaggagaatcacttgaacctgggaggcagaggttgcagtgagccgagatggcgccgctgcactccagcctggtccacagagcatgactgtcccaagaaaaaatacacacacacacacacacacacacacacacacacacacacacacacacatagtactattacaagactatttcatacttgatatgtgtttcatattaagcacattgggagggtagaacagatcactgtatacttttcccttctaaaaaaaacaaactgagatgagtcaggcataatgactcatgcctgtaagccctgtactttggcaggccaaggtgggaggatcacttgaacccaggagttcaagaccagcctgggtaacatagggagaccttgtttctacaaaaagaaaaaaattaaccaggcgcagtggcatgtgcctgtagtcccagttactcaagaggctgaagagggagatctcttgaggccaggagttcgaggttgcagtaagccatgatcacaccactgcatgccagcctgggtaacagagtaagaatctgtggctaaaaaacaaacaaataaataaataaaaaccaaaactaagatgagtattcattttttttagatgagaaaaataaatgtccaagcagggctatatttaattagcctttcaacttcaaagaccttaaagcatttaccaaagaagtgtaaatattaaaatcactgtgttttagaaacttacagaaagacttaaaagacttgcccacatggagtaagatccggagcactgtgctgtgtagaggatacttgaccatgacagaagacgtgggccttgctttttaagatctttttattaccttcaaataagaaagatcactgaagtaaaaaccaatcgcatactcttcaaaagctacaagtcatacctggctggcaagttctcgtgttggtgatataatcagggctctgaagcctttatttgcgggttgtttcagctgcattaaaataggaatgctaaaagctaatgtttttccagatccagttggagcagaagccagaagttcccgaccctaaaaacatagggtatattaaatactacaaagaaagtacataaatttttcagagcctggtcaaataacgctaccagccatagaaaaaaacaaatacaattttacataatgaatctaatctttcaagtcatatctgctttcctaacatcatccatccatgccaccatcaccccaacaaagtttctgagcattgcccttaaattccctttgaatgagtgtaaagaatacgggtaactaaaacccaaagataatccataacctaagttatatccattatttcaatttttcttttccactaaactattgtcaaaataaaattataaaaccaactttttgtcctggtatctgtattgttcaatcactagggaaggttttattgaacaacaaaatggctgaagaaataaaaaatggcaatgacctgagggcagagtaatttacaggagacaattttcaaaaactcactgtgttttttttttttttttttttgacacagagtctcactctgtcacccaggctggagtgcagtggcgagatctcggctcactgcaacctccgcctcccgggttcaagtggttcttctgccttggcctcccgagtagctgggattacaggcacacgccaccatgcccagctagtttttgtatttttagtagagacagggtttcaccatattggccaggctggtcttgaactcctgacctcgttatctgcccgcctcggtctcccaaagtgctgggattagaggcgtgagccaccgcacctggcccactgtgattttttaagctttaagctaaagccatgacagaaacaatcttaaacaaaaattaaaagcaaatttactataacataagtcaacagcatcatttaaatgtatgaatgtattctcatttcatctctcaaagaaaatgaaaaggactagtatagagatgaaaaggtatcttatatcctttggaaaccagaactgaaggccatctcggttacatggggaaaaaacccaactcttattgctacagaaacaaacctcagaaaaacttaacgtccgaaaacctaagttaatccatacctctatcaacaagtgactggataacaaattgtggtatattcatacaacataatactacttggtaacaaactattgctctatgtaatacagaagaatctcaaagcattacgcaaagtgaaagaaaccagaaataaaagattaatgtgtgattccactcatataaaactctagaagaggcaaaaggaatatacagcagtagaaatcagaatagcagttgcctctgagcaggggcagggtgaggactgaatggaaagggcacaagaaaattgtctggggtaatacatatgttctctatcttcactggaatagtggttacacagggcatgcattgctgaaactcactaaactgggcacttaaaaatctatgcattttattgtatgtaaagtatactttaataataaaaagtattcggaaaaataagtcagtttatgtacaagaactttagaaagcatttgtatttctggagtagttcctgggcattataaactaaataatgaatgtatgaatgaatagaacataatccccattctccaaggggttacacactagtaaaatgaaaaagataaatatgattggtgcgaatacaaagtagtttaaaatgtaaaataaatgttgcaaggaaaagaacacaccaaataccatggaagaactgcagtgtgggggaaagggtactagaaaaggaagaagatcacatctagatggagtgatcaagacaacttttatggaggcacaggcatttgatgaaccttaaaaggaagtgaaggattttaacaggggagataaggtggaaagaaagagttcaagaagagagggaagagaatgagcaaacacacagaggaaggaatgttacaggcattctagatcttcatactcacatgcagcataactgggatggcttgcatttggattggcgtaggcatttggaaacctgcatctagaatgttctgaagtagtcgagaattgattttatattcctggtcaagttgctgaaatgtagcaattgggtcaggaagatcggttccttggacgtgaattttgtgtttattccgcaagaagtttatctgaaaagtgaagtaaagaggccaccatggatatggccaaataaatacattctcagatgttataaagcaacattaacagtttctgggataacctttagcagcatatgaaactttttggttaaatccaagaatcaaaacatcacagatattaggtacatttcatgccctttcatagaaaaccttcataaaatgtctatgctttcttcatattaatgtgttattgtcatagtcataacttctaaccttaaataaacttcttagaaggcaggcattgaacccatctactattttaatatggtggttaacatacaagtatcattgctttttgatgatttaccctaaaactctgattattaaaactgagtgccaaaaagtggagtctagtagtgttgatttggtttgtttccccattctctggaccagagacagccaaattctggtttctgggttactgaagcattgccatagtaatccctgaagtgagctgaatacacctctccatcaggaatacggcaggtgtacagcagacacaaaaaaggtatatttgttgtttcttccatatcctactcctcttattcccaagtcataaaatacctttcttaagaattctaaccctctaatctgtgtcagaggaaatccttctaaaccggtgagctcaacagagaagaaagggagccaaattttgtttgtttatcgaaagcagttacgaaattttaaaaatttaattctaaacatactatcaatcttgaaacttgagcaggtcaagaattttatatatgtatcagcaatttaaactttaaaatgttcacccacagcacaaatgcctactttgctttaagttttcattaaagtaaaatctaaatgaatgtaattaaccttctatcttaacaaaactatattcacattaacaacagaataacccaaatccagcgaataagtcactaggtcagaaaatatatatacttttggccccaaaatatttttctaaccttttcttttctgagattctccaactttccggaagttagtttactttctctctgaacttttttgtcttcaatctttgcttctacagatgacatccactgtatagtagcaccttcttcttgggaagcaatttctaaaatatatttttaaaaagtaaaagattttaacagtctaggcaacatagtgaggacccgtctcttcaaaaaaaaattaaaaattagtcaagggtgggtggtggtgcaagcctgtagtcccagctacttaggaggctgagtggggaggatcatttgagcctgggaggttgaggctgcagacagctgtgatcatgccactgcattccagcctgggtaacagagaaaaaccttgtctcaaaaaaaaaaaaaaagaaaaaaggttttaatcttggatgtatgtgtagcaagaaagccataccttcacactaaaaaaggaaaaagtacagctgatccaactagataagagaaagtaataggatgtataaaaatggaaatgaaaaggcaagttctgtgttggtatgatcagagttctgaagcttactatcttccctttgttggctgtttcagcagtgtacttagtatacttgaaaacaacaggggattaattgaaaagcaacttaaacaatgataaatttctttcctttttttttttttttttttgtttgagacagagtcttgctctgtcgcccaggctgaagtgcagtggtgcgatctcggctcactgcaactgctgcctccctggttcaagaaattctctgcctcagcctcccaagtagctgggattacaggaatccgccaccatgcccggctaattttgttttgtatttttagtagagacgaggtttcaccatcttggccaggctggtctcaaacacctgacctcaagtgatccgcccgcctcggcctctcacagtgctgggattacaggcgtgagccaccgtgcccagccaaatgagaaatttcaataaggcagccacgttctctatatgtaaacaaccaacaactaaaaaataaatataatgaaagatctcacttaaaatagcaatgaacggccaggtgcggtggctcatgcctgtaatcccagcactttgggaggccaaggtgggtggatcacctgaggtcaggagtttaagaccagcctggacaacatgatgaaaccctgtccctacaaaaatacacaaattagccaggcatgatggcaggtgcctgtaatcctagttactcaggaggctgaggcaggagaatcacctgaagccaggaggtgggggttgcagtgagccaagattgtgccactgcactccagcctcggcaacagagcaagactctgtctctaaataaataaatagcaatgaacataacacaatactttgaactactcagtattataaagatagcctttctccctcaatctatgaagaacactagccaattaaaagtaatggcagaattgttttggtgactagatcagctgacttaacagtttgtatgggagaataaatatgtaagactaacctaaatttttttttttttttgagatggagtcttgctctgtcacccaggctggagtgcagtggcatgatcttggctcactgcaacctctgtctcccaggtgattatcagcctcccgagtagctgggactacagaggcatgccaccatgtccagctaatttttgtatttttagtagagacggggtttcaccacgttggccaggctggtctcaaactcctgacctcgtgatccgcccgcctcagcctcccaaagttttgggattacaggtgtgagccaccgcgcctggcctaacctaaaaacattttaagtttaacaagcaaagactagttctacaaagcaaagactagttctaatttctaaattagttctaaaactagcaaagactagttctaatttcttaattttttcaacttcactgaggcataaatatatacaataatctgcatatatttaaagtatctaatttgctgagttttgacatatctacacacccaaaaaactatcaccacattcaaggttatttctatcacttctccagatttcctcatgacaccttataatccatcactccatgcataggcaaccaccaatctaatttctgccactatagactagtttgccttttctggaattttatataaacggaatcatgtcatatgtactaatttttgtctggcttctttcactcaagatagttgttttgaaattcacctatgttgcaccatgtatcaacaacttaccgttttattactaggtagtattccattgtaatggatgtacagttcatcattcacctgatgagggacatttgggtcatttccagcttttggctataagcaatgttgctatgaaaatttgtgtacaagtcttcctgaagatgtatattttcctgtctcttaggtaaatattccaagtggaatagctgggtaatatggtaaatatatgtttaacttaaaaaaaaagtcccaaactattttccaaagtggttgtaccattttaccatcaacactgtgagagcttgtttctgtacatccttgcccatacttggtatggtcactcttttttatttttagccattctaatgggtatgtagtagtactgtattgtggttttaatttgcctgatggctactgatgttgagtatcttttatgtgcttatcaccatgtgtattatcttctttagtgagtagatacaagtcctttgatatacattttgcaaatattttcccatctgtggcttgccttttcattttcttaatgttatcttttgaagaatgaaaatttttagtttcgataagtccaatatatcaattttttctttttaaagaattttgttgttgttgtgctaaggaaccttgacatatctcaaggccacaaagatttttttcctgttttcttctggaacttttatagttttaaaacttcagtctgagtcatttgaagttaatttttgcttacaatataaagttaggtttgatgttcacttttttccccatggatccagtccgtttgtcgaaaagactttcttttccccgctgaattaccttattacctctgttgagaactaattgaccatatatgcatgggtttgtggactagctgttctgtttcactgatctatatataagggggtcttcaaaaagttcatggaaaatccgtattatgaagaaactatgcaaaaatttcaaaattttttgcaccaaaataaactcataccaacttgttacaatacgggtgaactagatctagtctgagacactaagaaggataagacagcagtttgaaaacagcaacatgaattctgcttaaaactgaagcaagaacaaactccaaatttacagtgaagcttcggtagaagaatagtgaaatcactgatgctttatgaaaagtttatggggacaaagaaatcacctgtttacaaatggataacttgttttaagaaggaacaagataatattgaagatggaagtctgtagcagcagaccacccgcatcaatttataaggaaaaaattcatcttgttcatgccctaattgaagaggactgttgattaacagcagaaacaatagccaacaccacagacatctgagtgtatataaccaattacaagctcatgcttgtaatcccaaatatatatatatggtttggcttacaccacatatatatttttttcaagatagggttttgttctgtcagccaggctagagtatacaggcatgatcacagctcactgtaacctcacactcttgggctaaagcaatcctcctgtctcagcctcccaagtagctgggactacagacatgtgctaccacgtgcagctaatttttttttttctttttggagtcttactgtgtcacccaggctggagtgcagtggtgtgatctcggcttcggctcactgcaacctccgcctcccaggttcaagtgattctcctgccttagcctcccaggtaggtgagattacaggcatgcgccaccacgtccggctaattttgtatttttagtagagacggggtttcaccatgttggccaggctggtttcgaactcctaacctcaggtgatccacccacctcagcctcccaaagtactgggattataggcatgagccactgctcctggccctattttttgtatagatggagtcttgctatgttgcccaagctggtctcaaaattcctggcctcaactgatcctcctacctcagcttcccaaagcactggcattataggtgagccactgctcctggcctccctaccaattctttgttttgttgtttgtttttgagaccgagtttcactcttgttgcccaggctggagtgcaatggcgtgatctcggctcactgcaacctctgcctcccaggttcaagcgattctcctgcctcagcctcccaggtagctgagattataggcatgcgccaccacgcccggctaattttgtatttttagtagagacgggatttcaccatgttggccaggctggtttcgaactcctaacctcaggtgatccacccacctcggcatcccaaagtgctgggattacaagcatgagccaccacgcccagccttcttcccaccaattcttaatgaaaaattagttgagcaaattttccatatgatgggtgccaaaaccactgctcccaaatcagctgcagacaagagcagagatttcaaaagaaattttaaacaagtggaatcaaggtcctaaagcatttctttgaagaactgtaacagaagatgaaacatggttttaccagtttgatcataaagacaaagcacaattaaaccaatggctaccaagaggtggaagtggtccagtcaaagcaaaagttgaccagtcaagagcaaaggcaacagcaacaggttttttggatgctcaaggcacttcacttgttgactttctggaaggccaaagagtagtatctgcttattatgagagtgtctgaagaaagttagccaaagctttagtagaaatttctacaaaaaaaattctgctagaattctaattgggattgcaatgattctgtagatcactgtagggagaaaacattgagttgcctaaaatattggtatgcctctccactctactggattttataacatataaggccatagtatttaaaacaagctagtattggtgtacaaatacagaaacagaatagaagaggtccagagacagacttgaatgtatatggaaaataagtatacaattaaagttgcgttaaagtccaatagagaaaacacggattatcaacatatggtattaagacaattagtcaacataagataaaacaccaacatatggtattaagacaattatgttattaagacaattattcagacatctgaaaaaaattttagttccctattcactccttataccaaataaaatttcacagggtcaaagattttaatataacaaattgaaactacaaataagaaaacatggaagttgttttttttctttttttttttttttttgagacagagtcttgctctgtcacccaggctggaatgcagaggcatgatctcagctcactgcaacctccacctcctgggttcaagcgattttcctgcctcagcctcccaaatagctgggattacaggcgtgcaccaccatatctggctaatttttttatatttttagtagagacggagtttcaccatgttggccaggctggtctcaaactcccgacctcaagtggtcagcccgcctccgcctcccaaagtgttgggattacagaagtgagccactgcacccagcctagaattttaaaaaaacgtaatgcgcagaaggccaaaaagtaaataaataagacaagtgacatatgacaatctggaaacatatttgtaaacataatatggcagacatagagctaatttcctcaatatatgaggtttaataaattaagaagaaacagaagaacgtaatatgataagggaacaatgtaatacaataagggtacaacgtacacgaagagacaaatttacaaaaagagaaaagtctcataccttgctggaaggcatcgcaaagtagaataactttaaaaaaattttgttccctttatgagacagttggtactaaatgacccaaatcattactaattcacaagctattcaattttccagttaaaaatagatacatgcctggctgggcgtggtggctcacatctgtaatcccagcactttgggagcccaaggtgggtgaatcacgaggtcaggagatcgagaccatactggctaacatggtgaaaccctgtctctaataaaaatacaaaaacaaaattagctgggcgtggtgtcgggcacctgtagtcccagctactcgggaggctgaggcagcagaatggcgtgaacccaggaggcagagcttgcagtgtgccaagatcgcgccactgcactccagccccagccacagagtgagactcagtctcaaaaaaaaaaaaaaaattgatacatgcctacacatttatcatagatctacggcctaaatacatttgttgccacaatggttacagtacatagctgtatatttctggtggcccaaaatttgaatccttttcctaagtttgtggcgtgtctttcttattggtaaaggttttatcaaacttccttgcagccagggaagaatgacttttactgcagcacttaacagcaaaagcatgcaaacaatgtactaaatgcccacacagtaacatgtcaaattgatcatggggcatccctacaatgtatgatgggctactatgctgtgttacaatgaacaaggcaaagtacttcctactgatgcagtgtttctggtggatacatctatttgttaactctgcaattccacttctaagaatttatgggacagatatactcacatatacatgcaaagataagtagaatgacactgcaaaactacaacagcaaaaatgtgaaaacaaactataattatccatcacacaggaacttgttaaatcaattatgcaatacacacaatgggatacaatgctgtgttaaaatgaacaaggcaatgtacttcctactgattccaaacaacctccaagatacattgtttttaaaaaaggggaaggtagtagcagaggttcccaacagagtgtatataaaataatcaaagtatataaacaaagtatgaggagtatttgtttttttttgagtcaggcataaatacataggaatagtgtccccagaaaaatacaaaagaaattgattaacagtagctgcgtgtggagaaacaggggactggagagaaacagtaggaaggaactttacttttcatcattgtataactcaagtgtttaccaaaaaaaggtaaatgactaggaaacttaatattatagattaaaaaaatataaacagccctagagtacagtacaagaaaaaaaaaaaaaaaaaaggccaggcgcggtggctcacacctttaatcccagcactttgggaggtcgaggcgggcagatcacgaggtcaggagttcaagaccagcatgaccaacatggagaaaccccgtctctactaaaaaatacaaaaattagccaggcgtggtggggcacacctgtcccagctactcaggagcctgaggcagaagaatcacttgaacctgggaggcagaggttgcagtgagcggaaaacatgccattgcactccagcctgggcaacagagcgagactctgtctcaaaagcaaacaaacaaacaacaaaaaaacaaaaacctctgtcaaaatgggcaaagagtaagaagaaacaattcacaaaaggtgaaatattaatgtccagtaaagcatacaaaaatatgcttgaccagccaggtgtggtggctcacgcctgtaatcccagcactttaggaggcggaggcggaggcggaggagggtggatcacaaggtcaggagatcgagaccatcctggctaacacgatgaaacctggtctctactaaaaatacaaaaaattagccaggtgtggtggcaggcacctgtagtcccaggtacttgggaggctgaggcaggagaatgacgtgaacccaggaggcggagcttgcagtgagccgagattgcaccactgcaccacagactgggcaacaaagcgagactcatctcaaaaaaaaaaaaatgctcgacctcaccagttatcagtaaaatataaaattgtttcaggcagggcgcggtggttcaggcctgtaatcccggcactttggggggccaaagcgggcggatcacgaggtcaagtgatccaggccatcgtggccaacatggtgaaaccccatctctactaaaaatacaaaaattagctaggcgtggtgacacgcacctgtagtcccagctactcaggaggctgaggcaggagaattgcttgaacccaggaggcagaggttgcagtgagccgagatcgcgccactgcactccagcctggagacagagtgagactctgtctcaaaaaaaaaaagtttcattcattagcttggcaaaaaaattaacaccaataatattcagcactgacaaggacttgggaagtcactttgtagtatttttcagagaaagggtacataccctttcaccatatgatgctacttttcggatggtattctgcagaaataacagtacctgtacaaaaggatttatgtataaatatctttacttaaaattacctttgctgtaacaatatttctaatgacaaatacctggaaacaacctgagtgccatcagctgacaaatgaccttattgtctgacttgtagccataagcctgtattatttttataactgaaaaaaattaaagagaaaaaacatgacagaaatcaaacactaacctgaagtcatcgtcttcctttttttcttgctctgctccctcttcctttcagttaggctctcttcttttttctctccattttggggcttctgatgtgtttgtgatgctccacacacacctgggacagacttcttgtttccaaaaaagtccagtccctgaagcacctccgaagaatcaaagtcatatttcctttttcctatctaaaacccaaaaaatgtaaaatgaaacctactgacagaataccattgctttcattcaagcaagactgttcaatgactcctcatcttttctaccctttcaccaagtatctgtcgagctaacaggtgtctggacaaatggaatctgaagagaccttctctgacctcataatagtaacaaattaatattagcaatgaacacatatatgcttactaaatgtcaagcagatttctaagcatgtttatacatattaaattgcttcacatttacaactctataaggtaaatagcagtattacgaatgagaaaaccaaggcattcggaaattaagtaacttgaggtaggtctaaaaatgagtaactggcagacttagcatttagacccagataatctggctccagagttcatactcaccagttagagaaagaagaaacacatgtcacacgcatatacacatccaaacaacaaagtagacattcaagattttccagaattgggccccaattgacctcccccgatgtatcactcactacttctctaggtaagagcccccatttcttaatcgctcttctcattggttacttaagccatggggttgaagcaataaaaagaatcacgcccagtacaactatacgcatgccaagccaaacttggggagactatagtaagagaatctgttttctccatctttggttgtttctgttttcgaaattcctttcctctaggttcggagaaaaagttccttttgaaaggaggattccaactttgctttgaataagagggaggaaagagggtttccgtgccaggcccaactaggtctacaacaggatagttaaagagcttattcaaaaggcttgaaccgagcagccgtgcaggcaagccgaacacaaaaggaagcaaaataccccaagggtggcgagagccaggccacgggtgtccaagtgcgccggcctcccccagcagcgggttcattcccgggctcctgctccttctcagttactcggccctcggtcccttgggcacagtacctggaatcgagctgcgtctgccgagaagcgtctcgtgtcgaatttggcccccgcgccgagccggcgaaagagatcgtggacgtccatctttacccagaaagcgccacagttctacggcgcctgcgcagactacttcccaggccccgggcagcgtcggaagagggcgtgagcataattggctcctgtaggcggagcctggctgggtgagaaacgaggctattttattatcgtgtactccgtcattatttatcttttttttttttttttgaaacaaggtctctctctgtcgcccaggctggagcgcagtggcgcaatcgcagcctcgaactcctgggctcaagtgatcctcccatctcggtctcccaaactgctgggactacaggcgtgtgtaaattcttttaaaaaatatttatcagtatcctcttatgttgggcactgttctagactttgagggatactatagtaaacaacatcttaagattcctcttcttacgaagcttacattttagtagggacaacagatattgttaacaaataaataagcaaaatctctgtaaagtaataagtgctataaaacaaaaaggtgtaattgatagagaaaatgatgagggagctgacttagtgaaattcactctgttgaagtgaaaacttgagctaagaggaagcaacctgtccaagatctgggaacagcattccagataggggaaacacgtggctgaagggaaaaaaattggaaccttgagggaatagaaagaatgccggtgcgactagagccaagttgcagtctgatagagtagtacagataaggttggagggacaaacagaagccagatctcacagaatcttgtaacaaggtcatagtaaggaatttggacttccaccttgggaaactatttgaaaatttttatggagagaagaacatgatttagtttatcacatttaattttttatatttattacatctgtacgaaattatttactgcttattgcctctccctcttctggaatgtaagtccctgagcacagggatatactttgcttcgttatgtatccccagtttctgtgcactttggtgaatgaatgcgtggatgtttcataaaggattacactggctatttggagaatggaccatagaaaagctaagagtggaaacaggttagtcaaagtagaatgatgatcatggcttgtctaggttggtatctgtgctgagagagataaatggattagatctggcatgtattttggaggtagagctaaacgtacctgacggattttatgcagaggtgagagaaagggaggaatcaaagatcactcctagttttttggctgagtagatggcatgccatttactgagctaagaaagcctgagagaagaagggctttctggtacaagtgagatacggaggatggaatcaattgttatgttttggacgtgttaagatgcctacctagttgactttaagtggagacatccaagtaggtagttggttctgaatctgaagctcaggaacaaaaattagggctagagaaattaatttggaagtcatcaacatataaatgatacaaaggagttgtaccatataagcatttaacttataaaaattcagttatatgtatttgaccaaagagaatgaaacatacttgaaattgtatgggtgagtcctttacaatcaaggaaagcaggtgtgaggtgagcatgtgatgggggaggtgaatctgcggtttctcagatgaattcagccccttactccctattacagtgggtcggggggtggtcttcctgtcccaagtgtgtctactctttaaaaataggaacttcccaagtacttcatctgttgttcaataaaaataatttatcttcagccaggcgcagtggcttatacctgtaatcctagcactttgggaggccaaggtgggcagattacttcagctcagaagtttgaaaccagccggggcaacatggcggaactccatctctacaaaaaattaaaacattagctgggtgtagtggcacacacctatagtcccagccacttgggaggctgaggcaggaagattgcttgagcttgggaggttgaagctgcagtgacttgtaacggcaccactgcactccaacctgggtgacagagtgagaccttgtctcaaaaataaataaaattaatctatttcaacataagaggaaaaactcaatattagtgtgttgatcttcagtttggcacataaatatggccatagccatatataaaattaatatgtatgaaatggcaactaccatactttgtggatgacttagggaatttaaaaaaaaattcaactttatgagattttttttttctttatgagctgatttagaacctaatccctatgtaagtggtaacaaacccatctccaaaagcatgagcatgaatgtgatcacttagagaaaatgtgtgaatggagaagagaaggggacccaggactgaccctatggtactctaatgcttggagatgaggtggaggaggagacacctgtaaaacaagagtctgagaagaagcaagtgaagtagaaagcaagcagtgaggtaggaagaccaggaatttggtgtcaccaaagccagacagaagttttaagaaggtagtgatcagctatttcaaaggctgttgagaggctgaagacagaaaagatcactgcatttggcaacgtggaggtcactagagcccctgataatgtcagtttcagggacattggtgaatagagatgattggtgaaggtggtgaaatggagatggatgaaaccactcttccaaagatttagctgagcaggatagcagagaagtggggtggtagctatagccagatgtggattcaaaggagggttttgcttttggtttttgatgtttttaaatatgagtgctaggagatgtttgtaaattatatgggatgacccagtggaaaggtataaattgttgctgcaacagagaagggagaattatgagatgggggtgggatgaaattttgtcagggtgtgttggagggctgagaagagaagtggtgtgaaataatattctctaacagtgggaaaatgaacttactgaagaaaggcggtaataattctgggcaataaatgcccatttgaggttcagggcaattaatgtaaaaggagacaaattagcatgattcagccacttaaataagggtgtgaagtgtatagtgttagatttggccagggttaaactttttccaggttaatatcatggaaggttatggcagagttctgtcctccccactccaacaagaaaagcacctgagattgatagttcaatagaagtttagccacctaggaccgaagaaggaagaggaagccactaggaataatactctgtgttatagtaataactcaacttgctgctttccgatcagaggaaagaagaattatattgagtgttgaatatgtactatattatttaccttcataagcatggacttggagttaaatagggctgagtttaaattctcccagcctcttcacctattagctgtgatttgtgatttggtcacattaatctttctgggactaatttctttgtttgtaaaatgaggatcatgatagctactttggaatcgttctgaagattaagctaggctcataggcagtggtgtgtagtggaaggagtgtaggtttggggcatcagaaatacttaatgtttgagtccaattgtgtcatttagtaatttgataatcttaaatgagttatttcactggtctgtgcctcagtttccttgttggtaaaatagtgattataggattataatatctaccttgaggttaggagtagcataacttttcaccacacagggctcaaaatggttgagatgggtcagaatactagatatgtataaaatccttatatatatatatatagatagatagatatatagatatatagatatatatattctgtagttattgtataaagcatttggaacaaaatctcacacatagtaggttcttaagcaatagtagttctttcccatctttcagttcttccttctagagcaatagttcttgaccctaaccacacaatagaatcttctgaagaacttatgaaacaagtgaccaagtgcagtggctcacacctataatcccagcactttgggaggccaaggcaggaggattgcttcaggccaggaattcaagaccagcctgggcaacatagggagaccccatttctaccaaacaatttttaaaaaattagccaagtgtggtggtgtacccgtagtcccagctactagggaggctgagctgggaagatcaattgagcctgggaggtcgaggttgcaatgagccatggtcacaccactagactccagcctgggcaacagagcaagaccctgcctcaaaacaaacaaacaaaagaaaactgattcccacccccagaaattctggtttaattgttctatactggttccctagcctgtaatttttgaaagcttctcaagtgattctaattgtagtcaacattaagaatccacctgctggaattatatttctgaagcccaaatgtggaccatgttgcttctctgcttaaaaacctctcttgattccccattgtctgctgaatgtagtctgaactataacttgtatgtcagtccctaagcagtgggtctcaacattttatctgcttcagcattctcaagaaatatgactccctgccataaacagcttcagcttgggttcaactctcagtcctatcacttaaccagctgtgtggttacgtatcctctctaagctttagttttctcacctcatttcagctttgcttccaactcagaaactttgtacttattttttttttcttcttggaatgtcctctgttcctttcctccatggataactccttatattcttcaatactcagtttacatgtcctctcctgagtgaaacttaccctgaatgtcccctccttgacatagtccatctttcttcgagttctcatgccacttcataagtacctctattttagctcttttcctatagcattgaaatgatatttccatgtatgtccacagactttgagctttttgagggctgttcctacatctcatttatcttcatattgtttgcttctcatggagtctgtttcacagtaagtggtcagtaatcttgtccaattaatgaagtgaaatgaaatagacaaagatccctgaaactgccaacctcaatgaattttggaatggaccttatgttttttgcttggtgctttgtgataaattttagatgaatgaatgaaagaagacaaatagaaactgttagacttagaccatttcataccctcacaatgtccagctgactcattaaaggaccatttcctcctggggaaaaaacgaaacaaaacaacttaaaagcattgtcaacaaaagtggtgaggaaactgaatcatggttttgtataactggaatttctctaaaaaccagtacggtctgactggtagacacacatggtttctcagctgtagcaagtgagaacacaaagtctgtataacactgcagtggaaaagctatttgggataacttgttgtgaatagagtgatcactctatgtcctaagagtatgtttttgaaaactttttctccactccttgtttatcattcaacaaacttggtggtggttgtttttacagtgtttctggcatggactagggcttagggatccaaaaatgaactagacacagtccttggtctcaagtagctttgagtttgcaagggacagagaactgtttgcaaacagagcaaggaaattctctaggcactgcagtataagtgtaggaagtgagggagtaagggtggcaggatggagtgggctttgtggaaagttagaaaagactttatagagaagacaaagctggcatagccttaacaaataaagtgttgaccaattagaaaacacaggtaaaagtatttaagtagagaggagagcagcgcaacaaatgtaaagagggatgaaacacgctgttgtgtttggggaactactagtggctcaacaaagctggaagtggatgctgcagcaagaattggagctggacaggtaggtagggaccagcttgtgacgggccttttgtatatactgaggactttgaacctgatattgtaggcactgagagccattagaggatgttaagccactgatataaagtttttaatttaatatttatttatttagagacagggtctcaccctgtcatccaggctgcagtgcagtggtgcaatcgtagctcactgcagccttgccctccccaggctcaggtgatcctcccacctcagcctccctagtagctgggactacaggcatgcaccaccatgcccagctaatttttacattttttgtagggatggggtttcgccatgttgcctaggctggtcttgaactcctgggctcaagcaatccacctgcctcggcctcccaacgtgctgggatgacaggcatgagccactgtgcctggcagtttttaattttaaaacatcactttagcagcaacacagaagagaggcaagttggagtcagggagaccaggacaatattgaaatagcagtctagtgaggaaagaaggcagtggctgtaggaaggaagaggagaaaggagcggatctaaaggacattaaggaggtaaagtgactggatgtgggaggatagcaggagagggagaaacttaaaataactcccgggtctcaaacttaggtgactgagtaggggtgagccttttcacggaaagggagaatactgaagggctaggtttgtgtgaggactatatattcatagtaagtttaattctgaatacgttgagtttgagatttttgtgggacatttgaatgaagtttctaatggttatttgaaagtaggaattattatttctttgcaacgggagctaggaacttttgaactgtaacttcaggatcttaatttaaaagtgagttgaggagagggtgattggctatggataacatccggaagccattcccacagtgagacaaaaaccttgctttccccgaggctgagtttccagcttcaaattctcaagatttaccaatagtctagtactttagaaatccaaatcaagtactcaagaaatccaaattcttacagttttttttttttttttttttttttttgccaccaatagtcaacagagtgtacttttaggctacaatgcaatgtaagtgtaactactcaaatattcttttaattaggacagaattgaagtaaatagcgcaaggaccaatgctgacctcacggtggcactccagtcttcgaataaagggctctctggactcatcttattgacctccaaatggacagtccacattgaagtgaagagttgacatgaactctgggcccatagaccccacagtttaatttcctgaagagaatctaccaaggactttgcttttctgtttttaaatcagctctgacgtaaggctggatcaatagaataggtgtcaagtatgcccgaatgtctccatccgtaaaaaatttcatcagggttcaaaagtaaccaaaataatttcaccattattatttattaatggataccatttattgaatgcctgctatgtgccacattgggttcagggtacttttcatattatatgagctcattgaactcacaatagctctatgaggttgatactacagtgttctcatttttctgagaagaaactagggctcagagacattaagtagcttgcctctcacatcatataggtagtaagtggccatacttggttttgaacccaatctgtgtgatccccaaacttgcgctctttaaacaaggctgcattgcctcttattattgatgccaagataaaagcagcaattaatgaaacttggttttcttcaggtatagactgtttggcatgaggtggtttaaataatatcatatttaaggagatctattgcgggcccctattgtgaatttgtgtcctcttcatgaaactctttgccacatatgagaaacaggatatttacatagtcacaaagtgtgtcccacaaggtattgattagttacgaagagaaaaattgaaaatttacagtggagcaacctggaagataccatgtgaatgaaatggtcacagtataaatggtaacataaaagtggtaaaatatcaatatgtacaccatggtcatattcttttgcttttattgtggaagagacaaagggacaagggaggatttgctgacactggtcaggagtggagtagaggactaattcctatctttgatctccatctgtgaaagcccagatcgcacaaagatttccaaatgaaatatttacatttctaaggggtagagaattattcgtgaatcctagacaatatacaagggaaggctcccaaaagaaagatacaaataataaaattctagaataatgttatagtactgattgtaggctatggggagtgggagttggttgtcctactaataaaatgcttaatcaagagtgtatgatttgtaaatcatatttgttaagcattttttaatgccttacagacttcaaagccctaaaacttttctgcatctctaggggttaatatcagcattttgtatattctcagcttgagataattaccaatctgcctattttttaaaagaactgtcttttagtgagaaggataagatgtctggagaagctttttgttcaacatgtcagtatttgcatgatttacagtgtaattaaccaggccctgtagcacaggcagaccggctcccttcactatttatcatgtttccagcaacttcagatcatcacctctgctgggaggaaatacgtccttcttagagatgtgaaaatatatccccaaccattcccacaggcagaatgtgatctatccttatgtatctattatttctcatatctaagggctcttccccctaccccattatttttatacagcattactctcagaactaaactagttaaataaatataaggccaggcatggtacctcacacctgttatcccagcacttgacgagagtctgaggcgggtggatcactttgagctcaggagtttgagaccagcctgggcaagatgacaaaaccctgtctctactaaaaatccaaaaattagccaggtgttttgacgcgtgcctgtaatcccagctactcgggaggctgaggcaggagaatcgcttgaccccgggaggtggggattgcagtgagctgagattgtgccactgcactccagcctgggtgacacagcaacactccatctcaaaaataaaaaataataaataaataaatacaaaatctaatactacttaggaataattttgttattcaattgcttatagtcaccagcacatattcgttaaggtataattgtgctgtgtaaaagacaaagtctggtgactcaaaatctaaaacaaaacacctatatagacaaataatattattacaaaactactttaaatctctatattaaaacattataggtttcaaaaaaacttcaaatgtgtttacttttggcccagtaatcattttaagaatttatcctgaatatacacctacggcaatatgaaaatacatacgcacaagtttatgtattgcagcattgtttgtatttgggaaataattgagaaaatctaaattcccatatggttctctagcaagcagactcagaaaaaaatagtctcctgtggaggagagtggttgaataaactacagtacaagtacataatagagtactataaatctataaaaaagaatgaggggccaggtgcagtggctcacgcctgtaatcccagcactgtggaaggctgaggcaggtggatcacctgaggtcaggagttcgagaccagcctggttaacatggtgaaacctcatctctactaaaaatacaaaaattagctgggcatggtggtgcatgcctgtaatcccagctacttgggaggctgaggcaggagaattgcttgaacccaggaggcagaggttgcatagctgagattgcaccactgcactccaacctgggcgacagagcaagactctgtctcaaaaaaaaaaaaaaatgaagatgtctgtgaaccaatatagaatgatttctaggatatattatttagtgaaaaaggtagagtacaaaacagtatctatagtatgctactttttgtgtaaaaaaaaaaaaaaaggagtgagaaaacatacatgtgtctgcttttttgaccaaaaaagaaaaccgggaaggataaattagaaagtaatgagattggttacctacaggaagtgggtggaaatgaggaggaaagggtgaggaggctggggactgagtggaggggatggggactgacagttttcttgaatatttctttttgtatgggtctacttttggaaccatgttaatgttcatatactaaaacacacatacacacacacacacaaatggggagggaaatcctaaaatggaatacaaacaaatcaacctaacagtttcaagtgaataatataatcaccctgaagagcgggtatgttggtggggggactaacccaatccaagcaactgcagaatataattttttttttttaactgtgtactctcagactaaagactaaatgaactgcaaatgaatattaaattttagttacttttttttttgcactagagggtgtcttttggtagcagttctaaaactacttctgtgtattctggaattgggcaaataagtacatttattatagataatggaattcattttcctcacagagagaagagagttacaaattagaacaggacaaaagtagaatgaatcgtatagtgttggattagacttggaatgacagtataaaactcatgttttttaagaaaggtatgagaatgtttttattgtgtacatataatcatatatatatgcatgtatatattccctggctctattcactgagaaatcccagacacaatgacaccccaagagcaatgagcacacctgtcacttaaatcatgatttctaattttgttcactatttaaaggaaccagagctccttgaggatttggccaattccagggaggctagggctggggacgtacaggatgagccttgcacattttattaagctagtaagttagaaagtactttaaaaatataggatcaggcatctcaaaatgtccaagagttatcctgaagggattgctgctggccaaatctggaagaattaagcataaaaataaataatgatagtaatgtattataactcattgaataacatgtgggcatataaataagagtaaataaatgtgggagaaggaaaagtgagtccttattgtacaatatcaactaataaatgtagaaggaataatggaattaggaaatcactatctagcaaccatcgtggtaataattgaatcatcgatggataggaaaactagcaggtcaagtttggttgagaaatgggatatttacatagtcacaaagtatgtcccccccacaagatatgtattaattataaggagaaaaattataaatttagagtggagaaatatgtcagatactatgttagcgaaatgaccaaaatgataaagcaaacgtggtaaaatagcaatatttaggaaattgggtgaagaatatacaggaatttttttgtacaatttctataccttttctgtaagtctgaaattaagaaataaaaagaaagagataagtaaaacacttttaaggattactaagctataggaagataaaggctgtaatcaatgtgtagcaagtaaattctgctcaccttcctagcagaacagcttatagaaggtcttagttggggtgtggggagtgagaagagggcaaataccttattagatgcttctttaaacgcaatttttattttattttttgagctagggtcttgctctgttgccaggctggagtacaatgttacaatcatagctcactgcagcctcgacctcttcggtgcaggcaatcctgctacctcagcctaccaagtagcttggactgtcatcacccaccactacacctggctaattacttttatttttattttgtagagatggtgtctctttatgttgcccaggctggtcttgaactcctggcctcaagcagtcttcccacctcgacctcccaaaatgctgggattacaagtgtgagccaccacccttggcatgaacacaattttttaaaattgttttttcaaatgaaagacttttgaagttttttttttttaaactctgtaatagaaattctgggtttctagtttttaaaaaaaatagaatgaaaattttaatcccagaagacctaaaaatttaagagagcaaaaaataaagaaatagagtaatttctgttctcttcccagatagtaaatttaaataaaaacttctgattatggctgggcaccgtggctcacgcctgtaatcccagcatttcgggaggccgaggtggttggatcacgaggtcaggagatcgagaccatcctggctaacacggtgaaaccccatctctactaaaaatacaaaaaattagccaggcatggtggtgggcgcctgtagtcccagctactctggaggctgaggcaggagaatggcgtgaacccaaggaggcggagcttgcagtgagccgagatagcaccgctgcactccagcctgggcgacagagggagattctgtctcaaaaaaacaaaacaaaacaaaaacaacttctgattatgttggcagttataaagttttaatgttactgatacagatgtacttcaaaactcttttatcgatcacatagaagtgagtgttaagatcattgacgagaactgtcctaggtaatgaggtggtaatattactactaatacaaggtgcctatactattccgaatactttttgtaaattaactcattcaatctcactgcaaccctatgttgtaaatactattattagactcattttatacttgaaaaaaccaaggttcccaaactttcttggtaactgtgctcctagagtctcagtaattttttcacaactcaggctcaaagaaatacttaataattccattgattaagttaagcccaaatatcttaatatatatttatgattttacaacttagtagccatttgaaaaaataatacatataaaacattttttatttttttgagagagtctcactctgttgcccaggttgaaatgtggtgacatgattgcggctcagtgcaacctctgcctcccaggttcaatcagttctcatgcatcagcctcccaagtagctaggattacaggcgtgcgccaacatacccaggtaatttttgaatttttagtagagacggggttttgctgtgttggccaggctgatctcaaactcctggtctctagtgatgctcctgcctcggcctcccaaaaagctgagattaaaggcgcgatccaccgccccaggccatacatataaatttaaagaaaaaaattgtatttcatttaaaaataattacacttacttgctaatgagagttgcaaaaaaaacaaaaattacccagacactaaaagcacagtaatcaataaagtttgggaaccttggttttttcaactataaaatgagtctaataatcgtatctataatgtaggccaggtatggtggctcacgcctgttagcactttgggaggttgaggcgggcagatcacctgaggtcaggagtttgagacaagcctgcccaacatggtgaaaccccatctctactaaaagtacaaaaattagctgggcgtggtgacgggtgcctgtaatctcagctactcgggaggctgaggcaggagcattgcttgaacccaggaagcagaggtagcagtgagccaagatcgtgccactgcactccagcctgggtgacagagtgagtgagactccctctctcaaaataaataaataaataaatataaataaataaaaggctctataacataaggttgcagtacaagcttattggatgctgcacatcttctcaaaccttgggctcagattggacactgccacactcatttcctgattcacgttgatattcacatagtacttgtttttcatcccagcaaccacagaaaactcagctttgcaatgatctgacattaccaaaagggtactatttgaatgttgaaaccatggctatctcatactagtagttcatgtgattttcaacagacattgagtatcactgtgttgtccttgaacatttgaaatattctgtgttgctctatggacttgctgctgttccaagctggagttccttgggacacagtttgggaactgtggttctaccacagcattgttttttcagttttggggacaaaattcttgggaaggtcatatgtggtggttcacgcctgtaatcctagcactttgggaggccgaggcaggaggattgcttgagcccaggagttcaagaccagcctgggcaacatatcaagaccttgtctctacagaaaattaaaaaattagctggggatagtggtatgtgcccatattcctagctacttaggaggttgaggtaggaggatcgcttgagcccaggagtttgaggctaccgtgagctatgattgtgccactgcactccagcctgcatgacagagcaagactttgcctcaaaaaaaaaaaaattctttgggaaaaatataaatcagattgtgatttttaatattacttaataattagtgtgaatattaataaattgtataaaaaattaatatcttaaaaatcttgctcttcatttaaattcatgtcttttttgttttatctaattgctttgggatagacttttatagacaattaaacagaaacaggctcatttggaatgaataataaattgttaacatcatataggtcaaaggtaactgcttgcattcaaggagtgggaagcaaggacagtacataataaatgtttcagctgataatatatgtaataaaaatattttataccaccaagtacatagggtgaactcaaggaacttcgtaagtttagttgaacctctctctttttttttttttttttttgagacagagtcttgctgagtctcccaggctgcagtgcagtggcgcagtcttggttcactgcatcctccgcctcctgggttcgagcaattctcctgcctcagcctcccaagtagctgagactacaggcgcacaccaccatgcccagctaattttttgtattttcgtagagatggggtttcacaatgttgcccaggctggtcacgaactcctgagctcaggcaatccgcctgcctcggcctccaaagtgctgggattacaggcatgagccaccatgcctggcctagttgaacctctcttttaagcaaatttattacttgaaattttgaatgttctaaactagtatacaaggggcttgattatttttacaaaagaatattatgtgagtttctttgatacttaaattttttttttttaattttaaaatagagacggggtctgactgtgttgcccaggctggtctcgaattcctgacctcaagcagtcctcctgcttcagcctcccagaatgctgagattacaggcatgagccaccacgcccagcagctttgatgcatttaaattatgatgtggttcactgaaattgagatgtgtgccctactttaaaaaaattactgaaactgagatagatgcccaactttttagaaaataggttttatttctttattaacaaaaatgtttttagacccgtggttttgctgtttcccaggctggaccaaaactcctggtgtcaagtaatcctcctgcctcaacctctctagtagctgggattataggtctgtgccaccatgaccagctgcccagcttttaaaaatacacattattttataaaatgcctcactgtgttctgttgcattttgagttttctgtcttttagaagtatgggaagcaaaacattcttctactatatataaagggaaaatgaggcacagagaaaagcagtgagtttatttggcatcacagagtaggaaattaaaaggcaccagctactcatctttattagaaaatatcatgtaatcagtatctaacagccattattttcataataaagtgatgctatataaaatcaataaataaaagtacccatttctgcacgatattgtattagaattaacatatgtgatttttttagcccaagaatttgtctcagttctattgactgtactgacacagtcaagataatggcagcatgtatcatatcccatgagtgatatgattgaaataagcttaatgacagatggaggaaatgcttgcttctgtttcactcctgtagtcatgataaggggtttcatttgattagggtaacaccagcttgcattaatggcatgaagaatcagaaagtttcattttactttgccatcatcattttgatagcagattgactcaataaagctggggttcccagagcattaagtaaaatatctctgaggcatctttgcaaagttattctgtagcctaggctgaaatactgtggttatatcttccttggggcttctagtattttaattatggagcaattacagagcattgccttctttcttttcactgctccagctgagtacctgggattctctaaggtaaaagcaaaggcctttccctgggtccttgggaaaagcagggaaatctaagacaatccagatggatcgcgggtctttttaaacacttttttagagatggcatcttgaataattgtcttcagggcggtgagccatagttcactaaccaaagtttcatttaaatatcatgatgaattggctgcgaaaagaggatggggaggaatgtgaagggatttgtataacaaagaaccataaatcatctccggtacagtggatcccctatcactcagcctatgggctcatcagaggaactgcagggagaaagatgagagggaaaagggtcttccagcttggggggctacagcatcccccaagttagcaaggtcccaaaccaagtctttcctgaagtatcattcacttattcatcttggaaatatctgtcaagtgcctactatgtgcaaggcactattctagttgccattagactgggaaagtgtaagggtgcggggtagtactactaagatgagtaggatacagtccctgctttactatttatgaggcatttttatggcaaggcctagcttctttggcattaacattagtacacaattagggtgtgcctaacttttttaaacagatgtatttctgagcctttctggcattaaagtgaatgtctatcaagtgaatctctacattcttcataaatctgtccctgttaccctcagttggaattaatttttctccatccctgtgttcccatagccttctctgtatatatcctccatcttcctcagtaggcctattggaggcaattgtcacggagtggaaagtggaaagagcatgggctctgcagccacacgggctcaaattagaattccagctctacctctaccacttagtagttgtgtgtgatctgggttagtttctttttttaaaaacaaaattatttccataggtttttggagaatgtggtctttggttacacaagtaagttgtttagtggtgatttgtgagattttggtgcacccatcaccaaagcagtgtacactgaacctgatttgtagtctttatccctcaccgcttcccaccccttccccctaagtcctcaaagtcattcttatgcctttgcatcctcatagtttagctctcacttataagtgagaatatgtgatgtctggttttccattcctgagttacttcacttagaattatagtctccagtcccatccaggttgctgcgaatgctgttaattcattcctttttatgactgagtagtatttcatcatctatgtataccgcagtttctttatccactcgttgattgatgagcatttgggttggttccacatttttgcaattgcaaattgtgctgctaaaaacatgcatgtggaagtatctttttcatataatgactccttttcctctgatctgggttagtttcttaacctctctaagcccccagtttcctcctctgtggcatggggatactagttcccattttgggggacttcataagtattaaatgaagtaaagaattcagcatttagaaaaatgcctggactataataagcattcagttgttaatcattgctagtaggtattttatagatgatcatcttacaggcaaggcaaccaaagctcataaaggttaaataacttaagtgctgtactttgtaatttgaaggaagtataacattggatttaagaactttggagccatgttaccttgttcaccctccttttctgccatttactgtttatacagccctgagccaataatttaattactcttggctttcatttctttattcataaaataaggatgatgactgatcatctgtcactcactgcttattatgaggatgaaaggagatgatatgtgtaaagtgcttggtatctagcatgcagtcagacaatagaagctgctattattagcagaagtcacctagtggccaagtggcaggacttagatttaaatctagtgggtctgactctcaagcacttgcctttttctaacaaactcaccaccagctccttttctgtccgagctgagattctgaagacttagcagatgctgtcaacacttgaaattgtttttttcaagtgtaataaagtcaattggttgattttctcttttgatgattgctttatatttcacaactatatactcacatacccataatcttgaacagcttttccttcctcaatcaacagaatatgtataatttataatatatatgtttatatactgtatatatattttccaacctcataaaggaatagccaacatctcaaaggaacatactgctgccttcgcccacatggacttttcaaaacacttgcttgtgaaagaaatcatcatccccgaggaagcattacggggaatttcttgcaataaggagtagtatcaaaattcatttgtggaatgaaacccaagtgaaaaggaaaagcaagggcttgccttcttcctccctgcaaaccctgtcttggaatactttccctccccagccccaggaggggcgagaacagtagggtcaaggggtggtgaccaggttagcgacaagggcaacagagggaggagacaaaagagcagaaagtggaggctgctacccgaatgcctgagcatgtttctttgctgaaagagaatggcaggacaacgactcaaactgagagaagagggtggagggggaagaggacagctaatggatggggtggcccagcaggggtcagaggtcatgagggcacacagtgaactaattggccactctgcatattcactttctgcttctagcctacagctgggccttgagagaaaggcctgggggtgaagctggctttatttacaccatagatttgaggccaactggtgaaaagcaaccaaaaccgaaaagggagacaagaactctctttcctcctgtaggaacatctgaccaggggtagccttttgcaaaagaaaatgtgaaagatttcacttcattcattcatacattcattcatttattcttcatcatcatcgtcatcatctccacatgttaattggatgctccaagaaatgttaccagatggagaaggattatagacacctttaacttggaacatagatgattagagttaaatttgggcttttgagatcatctagttcagctctcttgttttatacttaaggaaaagagaaaacaatttactcaagctcacaggaaagtagcagaggagggagcagagctcagatcttctccaaattcagagatttttctagtacacatttctcagaaacatagtagatgaaaacttgtgttgactggtgtgattaacagctcagcctctgggtcaaacagactgggccagaacgccagttactagctctgtaaacttagaacacttaatctttcaaagaatcagtttgtagaaaaatacaattgttatgtgaatcaagagaggtaaatgcatgtagagtgagtacatgctttacaataactatgactattgctattactttagagcccggtatagactgtgcttttgatgataaacatgtaacacaatgaacatttctcttgccatatataatctctatgggcctgccgtcccaagatgaaaatcctccttcctcctcagtttagagacccatgaaggtaggagggaaactttagaggcctgtctgaaccttttacagacagagctgcccaaatttggaatgagccaactttcaaagagtcaatatatgggaagggcttaaagggccaggcacatagttagcactcagtaagggttagttattgttattattactggtaaggagggagttctttgtcactgcacgggttcaagcataaggctggcttaccctttgtcaggaatgtttaagggagattcatggattggacagagtaacctgggctcagcttttctgttattctgctttccagagactttgtttcaccctcttcaaaggtctggctgcatgaagcaaggaagggaatctgggaacctaactgtttttcaaagatttccatcaggccaggcgtggtggctcacagctgtaatcccagcactttgggaggtcaaggcaggcagatcacttgaggccaggagttcaagaccagcctgggcaacgtggcaaaaccccgtctctactaaaaatacaaaaattagccaggtgtggtggcacgtgcctgtagtgccagctactcaggaggctgaggtgggaggatcacttgaacccgagaggctgaggttgcagtgagctgacatcgtaccactgcccttcagcctgggcaacagagtgagactctgtctcaaaagaaaaagaaaaaaagaaaagatttccatcagtctttatatttttcactccaccttcatccttatcgtctgaggtacctggtagactgttgtggagggaatgtttgtgtttccccaaaattaatatgctgaatccctagcccccagtgtgatggtatttgaaggtgaggcctttggggagtaatgagtaattaggtttagattaagtcatgagggtaggactctcttggtgggattagtgcccttttaagaagaggaagagagagagttctgtctccacgagcaaggaaaggccacgtgaggacatagcaaaatggcaattgtctgcaaaccaagaaacacaccactgcattccagcctgggtgacagagatagaacctgtttcaaaataaaaacaaaaacaacccaccccccccaagtgtcttagccattcttgactcttttctagttcatatttgaagattagtttgtaagttttttatatactatatataaatataaatgtagccaagttgggattttttttttttttttggtattgcgttgaatttatagataaatttgggggacgattgactgtgtttataatagtgggtatttctgttcacaaacatggtatattgttctatttatttagggcttcttttatgtccgccaataaagttttatcattttcttcatttgggttaatacttcttttattagatctattgctaataccttttagtttttgcagatatgtaacagggtctctttaagattacattttctaattagttttgcaggtgtataggaatgcatctgactttttgtatattgattctgaatccagcaaccttgagcaatcctttcagtcgttctgatagcttgtctatacattatcttggattctctatgtaaacaatcatattgtcaacaaatagcaacaattttattttttcctttccaatccttatgcctgtttatttccttgccttattgcattggctgggatagccagtaaaatgcaatgaaatgaatgcaggtggtgaaagcggatagctgttaaagggacatgccaccttaacaggcatatatcaccagagctattggctttagagctatgctgtgcctgccagacctgtaccagcaaaatgtatgtatctttggtgttcaaaatgtatacacctttggtgtttgagaataggtatttctattctcatttaatagataaagaaacagaaactcaaagaagtaaccaggtctgtaaaccccgcactttgagaggctgaggcagaagggattgtttgaagccaggagattgagaccagcctgcacaatataaggagaccttgtctctgcaaaaaatttaaaaaacaaaagaaactcaaagaggtaagtaacttgctaaagaccacacagtttataagtgggagattcacacccagatcttccgatttccagttgaatgccatttccatgattccacacttccttccagctagttacctgataaatctatctgtgctaatatgttgcccatcccagataacatattgcattttatcttattatttatttacttatttatttttttgaggcggagtcttgctctgtcgcccaggctggagtgcagatcatggctcactgcagctgtgaactcctgggctcaagcagtcctcccaccatggcctcccgaagtgttgggattataggtatgagctaccacgcctggccgtagaatgcattttaaaagagatacttcagaacaaacaatgcttttacccatttaaatgagtttttaacagtgggagttttaggcaagttttaggcaagtattttgccttaacagaagactctgcctatttataattttttaaaaacagattcattgactcttagagttgaatggcttcttgtctcatccaacccactatgtaatgtagttatccctgtattgcatccatgacagatcatcctccggcatttaccaactgccagggacgggttcacctcaccagcaagctgttgaataaattctcatgtgaatccacaatctgcccactgatctagagagttgttttctcctttacctgacagctcttcacatgtttgttagtttctcagactacctgtctctaggaggtttagttattgtctgaatgagatagtttccagacttctcactatcctggtcattctcctctcagtgctttctagttggcaaatgtccctcttgaaaatgttgcctaggccgggtgcagtggctcacgcctataatcccagcactttgggaggtcgggataggtggatcccttgagctcaggagttcaagaccagcctgggcaacgtggcaaaaacctgtctctacaaaaaatacaaaaattagatggggctgggtttggtggctcatgcctgcactctcagcactttgggaggccaacatgggaggactgcttgaggccaagagttcgagaccagcctgggcaacatggtgaaaccccatctctataaaaaaaagtacaaaaagtagccgggtatggtggcatgcaccttagtcccagctacttgggaggctgaggtgggaggattgcttgagcaggggaggggaaggttgcagtgagctaagatcgcactgctgcctccagcctgggtgacagagtgagtctctgtctcaagaaaaaaaaaaaaaagaaagaaaacaaaagtaaagaaaatgatggctaggtttttaagatgtatttggattgcaaacaaagtgggcctcatatcatctggacacagttacttctattgatgctgtctagatttgtgtctttagtagctatgacacactgcttatttgtggtgagtttagggttaattaagccctccatatattttttatttgaactgcatttctgaaaatatactatttgtatgttaaaaaagagaagaaaaatgcttctgaagacaggaatttatatatatcctcactaaatttaataatttgtgtggttacttcataattggccatctataaatgtgatcaagcatgccttctgtatatagagcgaggcctgcacttgcagaatgcaaagacaaattgtcctgcattgcctaatcattcagaccagaagccatggaggtatatttgtttgtttttaatctttcatcccctatgccctttcctgcagcactctggagctctccaagacagagcaaagtctgtggggaaggaaccaggacagaaatctactctgttttggagacaaatggggcagcacctgcagcttggaggctgcagcaggttaccaggaaacacctgcttggtcaggggtagggaaagtcattaggactgctgtcccaggacagaataaaataccatcctcaaatttcagaacactggtacattgggatttttactatagaattaaaattcaatttcttttttttttgagatggaaccttgctctgtcacccaggccggagtgcagtggcgcaatcttggctcactgcacctctgcctcccgggttcaagcgattctcatgcctcagcctcccaggtggctgggattacaggcgtgcaccaccacacccagttaatttttgtatttttagtagagacggtgttttgccatgttggccaaactagtcttgaactcctggcctcaagtgatccacctgcctcggcctcccaaagtgctgggattgcaggcgtgagccaccacttccagcctcaatttcttacatgaaaccacttcatgaatttttaaaaaacttacttgatgttggaagatccacaggaagggaaggggcggcaggagtgctctcctcagctcagtctcacacctcctggtttagtgggattggcatccacccttccatctgactagcacaaatcaacttcgagatatgtttttgagaccgaaatcctagctacccatatctcccttctgcctatcctgctcaaaaactcatacttacaaatcaatagacatcctccaccccaacacatgctcctcatcttcaataaatacttgtaactttgcctgtgtaatattcacaaggacagtgttgtacgtgtctagcattgacagtgcaataataaaaactgcaagcatgtggcacttgtgatgtgccacccactgttctaagcactttatagatgtgaactcatttcatgacgttaattcatttcatccaaaggacaacagtcctgtgtggtacataatgttattatctttgttttacagttgaggaaactgaggcacagagattaagtgtttgtccaaggtcacatggctaaaagtggcagagtgggattggagttcatgcagtccagctccagtgctcttaaccactatcttacactgtctcactaaattgtggagggagctgcaatggatatctgtgtggggtgtgcagccccagtcctgggttttcgtccataagctgttctttgccaaatgatttctaattataataaccaagaacatgattactttcttaggataggaactgccagcaggctttagctcctttccagatgaggaaacgtaggctcggagtgttagtgtagtcagggtcacatagggaataagtgacagaaacaagaatgtgaacccagctcagggtgactttagtgtccagacacctccgcttaacctacaatgtcacaatggtgaggtcaaatattcagaaagagcttagacactctccataccctctttttcatgggctagagaatacatggaggcctttcttcagggaaaaaatcatcataatcattaccaaagcatcttgtcgaagatccactgggtgctggatgctataatgtggggtttttttaaacttcaatatgaggatccccgaaagtatgagtgtttcatcatcaacttggcagaagttagctgaagggtatgtaagcctcctgtcctaagataggtttcttcatttcttgagctgacaggttgaattaagttactgcttctcatatatagctctctggcttttgctttaattttattttttaaactggtgatagcagcaataggaggcccttgcttttagatcaagcatagctttattttttttcaggatgcaagtcaagagcatagttcctaaagaaccgtgtggtgatgtctgggatcactggggtgtgcacatttattttattttattttattttattttattttattttattttattttattttattttattttattttattttattttatttttttgagacagagtttcgctttgtcacccaggctggagtgcaatggcatgatctcggctcactgcaacctctgcctcccagattcaagcgattctcctgcctcagcctcccaagtagctgggattacaggcatgcatcaccacacccagctaattttctatttttagtagagacagggttttgccatgttggtcaggctggtcttgaactcctgacctcaggtgatccacccgcctcagcctcccaaagtgctgggattacaggcatgagccactgcgcccagccgggatgtgcacacttctatgcatacacatacacctggcacagacaagcacacgtactgccacgttcatggtgtgaatccctggaaataagggtgccgtcaggggaccagcaagtgcatggtatggtctccattcctgggtgcattgatgtggcctgccatgccctgctgggttgaggtgggcctgttctgtctgctctgagtcctggctgggtcagtctttccaggagtgtggggatacggtttctatcaggcatgcccaacatatccccctggtcttggatcagcagggcaggctggcaggaatgcctacctcagagcccctaagcagggtttaggtcagtgacctctccactccccaccttggccagcagtcctccagcaacgatgccaaggatgcttatttgtttgtttgtttatttatttattatttttttttgagatggagtcttactctgtcgcccaggctggagtgcagtggtgcgatctcagctcactgcaacctccgcctcccaggttcaagtgattgtcctgcctcagcctcccaggtggctgggattgcaggtgtgtgccaccatgcccagctaatttttgtatttttagtggaggcggggtttcaccatgttgcccaggctggtctcaaactcctgatctcaggggatccgcccaccttagcttcccaaagtgctgggattacaggcgtgagccaccgcgcccagccccaaggatgctttcttaggtcaaaagggaaagcattgttgctgccctgtggccaggcaaacaagctgctggctttgaagtcacaggggatttgctcaggctggagttgggagtctgaaggagaggcctccatgccttcctgaagcctcactgcgtttattaactccacctgcctacccgggcctggtgtgtttgatgtctcgggagaagcaggaggagggaggcatgctctgggggtcctccgagggacatctttcagcccctgctgagcctgccatcccacctggtctgaacagaaggaaaaccaggcccaagtccagaagggctagtgacaggcctgtagtgaaggggacacctagtccccctcccttcaaggtagtttacaggagtgtgttccagggccagttggagagcaggctgcttcccttggtcattgtctttattcaggtggcatccggtgagaatgaaagtcaagggaagacttgaagagagaaagaggcatccagaggcagcactggtgccttaaggggccacagcaggtctctccactttgccctgaggtccccaatcacgcctctgccaggtgcctccccaactcctgccccatgcttcaccccttctccccaccaaagcagcatgagtgggcaatttgccatttcccagcgacagctcagaagccttaggtaatgaccagagacattccccacccaccccctactcacactcaataaaatgcactgatgaggaatccatggagtggggaagaaagttctagagagcaggagcctgcgtaaaacaatgctcgcctctctgggcttgccttgccccaggatttcactatgttccaaatcatgttttattacctttcagggttgggccatgggaatgggataagaagcaaagcattattattaaccagttccatgtcccatacaatattagccatgaatagctccatctctcccccacaatttccctatcagccacattctaatgccccccacccccaacaccgctctctagtctgtctgtctgcctgctccccctgcccctgacatgttgcaattcagaaagagcttgtttatgataagaccttgaaatctggagttataaatcctgcccagggcggccgccctatctctgtgctaatgcttgtggtgccaaaaggaggctcacctggttgtgacccagtccctcttactccctgaggagttccctgctcctcctctgcaaacacaggacaatgggcaaatgggagttacctgttccaacaggtgttagctgggcctcactttcctacagggtgatgagaaggtcaccctctggcccgcccacgctgggcattcctgtgactgtgaaagcccaccttcgaacatgaccctccctctcccccaccctcccatgacttcagctacaggagactgagcccacctcaatggctttaaaagtccccacttgaagcttctgagtccaccaactagagagcaggcagcacctgcactggctggagggcccttgtgctgcctctttattctgtacaggcctctgtcattgtgtttacaccatattgcagttggcagttgttagccttccctactaagctatgggccccttaagggaagacactgtttctgattcatcattgaattcctaggcccaaaagactgcacagaacataaatatttgttaaatgactaggtgaatggtgtcatcattaccagcacatatttcttcagggtatcttatgtgcagcgaacctgctaagcagtagggatacaaagattaattggacaccattcccactctcaggggcttatgctggagtcggggagacccactgaagcttcacttccctagaggtcagaggaagagctggatctggggaccccaggaagctgctttgacaaccagaggcctagggtcttgggaaagtttgcccagagtgaacttaccacagatgccagagactcagatacctactcaccattggtcttggtacattccagagtggaggtgataacttgccaactaacagcatgtggagccttttcctttgtgacttgtatcctcctctcaacaatgggaataaaagtaatttctagtatcttcacttggaatggatttttcagccctttagctctgggaagaaaagaagtgaaactggcccccactgggccctagctggagctgtacttgttagctctgccccataccatttggtttaggctgcctgtggatttgaggccacagctgcctccaccctcaggaggaaggaacgaggaggtccaggcatctgtctggagttcagttcatcccaacacacattaattgaatgcctcatctgtgccaagcatgctggacagtgggaatagagaaattaacatcgtgggtgtagctcctcctttcagacagggactgatatctctgagaacctgtgggaagaaggacaaccagttgatctcttgaggactgagagtcagcccacatgatatgagaggctgttgcatcccaatgccattgtctcatggaggggacctttactgtgtggagtgggggcctagcagtgtatgtgtgggcagtgtggtgcagtgtccatgggtggtgttttctgtgtggctgtttgcagtcagcgcttttgaagcttttcatgtgaagtaccattagtggcagagagtgaattcacacttcacaaggggcatggggttttagatcactgcacacagaaactttcttcgaagccccatgttttgtcttaaaagtatgtttaggctgcgcatggtggctcacgcctgtaatcccagcactttgggaggccaaggcaggtggatcacgaggtcaggagattgagaccatcctggctaacacggtgaaaccccgtctctactaaaaatacaaaaaattagctgggtgtggtggcgggcgcctgtagtcccagctagtcgggaggctgaggcaggagaatggcgtgaacccgggaggcggagcttgcagtgagccgacattgcgccattgcactctaacctgggcaacacagcaagactccgtctcaaaaaaaaaaaaaagtacatttaaattttctattttctaccataatccatctgtttgcttttattgaaaaatgcagttaacatttcttatatctgaataaaatggacattccaggaagataagccatctttcctgtgacttcttgcaacctctggctcacagccctattaccctagcttgagaagcttgccttttgggacatcaggcccagatgtaccacattcagggtgccaccccaaagtggatttctaacacacttgcatggtccatgcccgtgacctggaaacactgttctggatttggcctatgctgccctggtcacacactccttcagtcagaccccacaggaccatccctccacctctcggcttatcctggtccctacagcagggtttggagatcaggtggccagtgaccatattccccagatgtctggggcaatggccatcaatctttttgtagtctccttcacagagaatgagtagggcagaagcagcagtgagcatgggatcctgaggggagttcacaacaactaacacggccaggtgcggtggctcacgcttgtaatccgagcactttgggaggtcaaggcgggcggatcacctgaggtcaggagttcgagaccagcctggccaacatggtgaaaccctgtctctcctaaaaatacaaaaatgaggcatggcggcacatgcctgtaatcccagctacttgggaggctgaggcaggagaatcgcttgaacccaggaggcagaggttgcagtgagccgagattgcaccactgcactccagcctgggagacagaatgagactctgtctcaaaaacaaaaacaaaaacaactaacagctaatgcagatacttgaactaattatctatctaaagggtcctggtctagggattgttctcacaactgccttggtagctttagtacaatgccccgtttagtgttccctgacacaattgctttatctgtatgaggaaacggagtaaagactacattttatctggtaatggagaagttctatgatcccaagtccatataggtttattatggattcaccgtattagtgttttttaagtttttaaagaagtgtgatgccctcatttttttcactcacacattaatgcattttcttatttattcaacaagtctttatacagaacctactatgcttcaggcactgtatgaagtcctggagatatagtggtaagcaagaatggcatggtctgggcccccttagaatttgcaagtgagagacaaaattaaacaaatggtctccatggaagcaaacaaagcaagttcaaatggggcaagcccagggctttcttctgctgactgctcctggatgttctgcccaatagcctaagaacacagttagtaggtcctggactaagtcagggataacaatagattgtctatgattcctcatatggaaagtaaaaacaaacgtaaaatgaaattcacctccaagtccctcctcctgctcgactgccccagagaaaatgcaccaaaccttaagtgtgcaaacacacttaagaataaggaaattcattatttcatttagtcctcaaattagggctgtgaagttaagtgccatgattctctccatttcaaagatacagaacctgagaccttagggaggtgaagctcacctggccaggatgggagtaagatggagtttacaaatagggtggggaggaggaagctttggggcatgactcttttgagacagggtctcactttgtcacctagggtggagtgccgtggcatgatcttggctcttggcttactgcaacctccgcctcctgggttcaagggatcgttccacctcagcctcccaagtagctgcgactacaggtgcatgccaccacacttggctaatttgtgctaggattacaggcatgagccaccgtgcctggcatctcttgattttactgaacagtgctgggctggaggcttccagtgactctccagacagacccctgtggttctggagactctgccactgccccttatctttcctccccatggcgcacacggatttgatggctctaggtgctaaaaactctggactctagaactcagctaaggaattgcagagctgatgggacagtggaaatgtgggcaacgtgtccgaacaacccacagccctgcctcctcctccccagactgaccaatgaccctaagccctgaatggatttttccttttttttttttttgagatagagtctcactgtgtcgcccaggctggaatgcagtggcgcaatctcggctcactgcaacctctgcctcctgagttcaagtggattctcctgtctcagcctcctgagtagctgggattacaggagcacaccactgcgcccagctatttttttttttttttttttttgtatttttaggagagacagggtttcgccgtgttgtccaggccggtcttgaactcctgacctcaaatgatccgcccgcctcagcctcccaaagtgctgggattacaggcatgagccaccgtgcccggccctattggattgttcctaagaaacttggcatggctttggcaactgacaatcctgacaaaggattatcacttccgcccttcgcctttggagtatcttcatctaagccttcactgcccttaaaggaaaattcagctgaatttggaatgaatgaggttgtacagctaatcatgtttagagtcaccttcctatgacattaaggcctccaggagagtcattgaaaagtctgtgaggtctgctaattctattgagagtgaggaatgtgtttattcttccaaggggcaaagatcccccactcaaaatgacgctgccacattgtgtaaccaggaacgtgggttgttgctgatgtaaacagatggccaggggtggacctgccaggatcccgggtctccttttcccagaggtgtttcttatgaatggttgtgcccagtgaagcaatttcctgccttgtaaactgctgcccaccaaaccacatctcctatctatcgctgcctggctctgggtcataaaacaattccccacaaaccaatcagagcctgattaggagaccttgagtaacaggaaaattaccctccacctgcagatgtaatgacactttgcaagctagtggctttgcagtttctgaacgtaaacatcacatgctttaccccatgccccacctctgctcatctgagatgtgggggctacatatttgattctcaggccctggttcactctgctggggcaccggctgaccagtgacccattaccttgacctgacaccctgcagcctggagaacacatttcactctgtcagatcatgatttacagagccagggcaagagaagttcaggcaggggtctcaggcatgcagagctgggttggaggaatcaatgaggacagaggatttggactgaaacactatgaactcattgatttggacattcgctttgcattgtgggtctggaatgcctcctccactatcctctgctccccattcacctggtgaactgtcattcattcttcatgacacagtttacatatctaccaaggaaactttgattgccatccaagcagaacttcctctattgtcctatcaatattctttctaacacctacactctgtaattgaaatcacttgctaagttgtctgtctccccagccaggctgggaactccttcagggcattttagaatccccaccacccactaccatgcctgactcaaagtcagtgtgcaaaagaggtttgttgaatgagcactcacactcaagtgcagtgtctccccactgcacttacgtgttttgcatattgaaaatgtacaaagaacatagtcaaaggaatgaagaacctgggttaggctgataggcataacataaggtctttgtccttaagaagtttgcaatctgatcttctttctgtgaatagtaggagtatttgcaggtggtatacagaaattggacccatggctaggcataagtgttgggtttttcccccctttttagtgccagctcaaagctgaaatgagtttgagaggtggcctgtttttctttagctctctcagttgttttaactttgacttttagtttagtactaaacaagtcacacttccaacgatccatagtaatacactagccataaaacaccacccaggactgccattttcatctcttctttctccttatccccagcaatagaagtaataccaatgacttgcttctttctttgaatcttgggaggccccagagagtgatggtgatagtggtggtgggaggtgtgtattggggtcattttccaaacataaaactagtaaactccacgatacacatacacacattcccttatttgaagaatatttaccgagtgccaatgtgtgtcaggtaccagatgctggggacaaaccagtgaacaaaacaccacatccctgctctcacaaaacctatattctggtgggaggaagacagtgacagtagggaaggggcccattgtgctatctcatgttgtattcctgaattggatgctaatgatgaacatttattgagccctttcttatgtaccaggcaaagggctttatgcatcttctatctcatttaatccccagacaaccccattttcaggtaaggaaacattcagagaggttaagttgccttccaaagatctcacagctagtaagtggtagagtcaggatttgaaatcagatttgaattactccttactctgagctcttaaccacaactctataaggcagcagtaaatatttactcgatgaacaaatgagtagataaatggttaaccctaactacagtggcaacctattgttttgtctccatgatacaaacatgagcaacatgcttgtttttcattgacttattgattcaattgccccaaagtgtggttcctgaaagtaggttttgtattgattaagaaacaagtgtctttcttgttaccatccatgtttcctggacaagacaacctattttatgaaaataatgatgaattataatggaaaaagttgtacaaaagaaagtgtcaccttaagttctcttttctggctttgaatgtgtgggtttgtgataaagtctctgtattaggctgaataatgacccccaaagatgtcaggtcctaatgcctccatcctgtaaatgttacattaaaaggaaaaagggtctttgccgatgtaattaaggaagattatcctaagcaacacagtgggctgtgaatacaatcacatgtatccttataagagggaggaagagggagacttgacacagaagagaaggcgatgtgaccacggaggcggagataggagtgatgtggccacaagccaagaactgctgacagccaatagtggctggaagaatcaaggtaagagtctcctaaatttcgagcttctggagtgagtgacagcctgttgacagcctgattttggtccagtgatactgattttggacttctggcctccagaactgtgagggaataaatttctgttatttaaagccaccacatttttggtaatttgttacagcagcaagggggaactgatagaatctcctagaggaggaagcagtagggaaacaaagtcttcagcagacagtgcaggtgattcagaaatattcactcagttatctttttggtcagggtgcccaaaagaaatcctatcttggaaagcaaagttacccatgcaaatatgaatccacctccttccccaccctcctctttcacgtttctctgctttgttcttctttctagtatatatcaacactcgtatttttgtttatttagtgtatatttagtatattgtttagttcttgttggctccctcccagttgaatgtaaaccccatagggaagtgaccttttataaactgcttttcttcccatgcctagagaagtatgtagcgtatagtaagcactcaataaacacttgtcgactaatgtggtttggctctgtgtccccgcccaaatctcctgtcaaattgtaaatcccagtgttggaggtggggcccggtgggaggtgattggatcatgggggtggtttctaatggttttagcaccgtcccccagtgctgtctcgtgctagagttctcatgagatctggtcactcaaaagtgtgtagcacccagtaaccaaaacagcgtggtactggtaccaaaatggagatatagaccaatggaacagaacagaggcctcagaaataataccacagatctacaactatctgatctttgacaaacctgacaaaaacaagaaatggggaaaggattccctattcaacaaacggtgctgggaaaactggctagccatacgtagaaagctgaaactggatcccttccttacaccttatgcaaaaattaattcaagatggattaaagacttacatgttagacctaaaaccataaaaaccctagaagaaaacctaggcaataccattcaggacataggcatgggcaaggacttcatgtctaaaacaccaaaagcaatggcaacaaaagccaaaattgacaattgggatctaattaaactaaagagcttctgcacagcaaaagaaactaccatcagagtgaacgggcaacctacagaaagggggaaaatttttgcaatctactcatctgacaaagggctaatatccagaatctacaatgaactcaaacaaatttacaagaaaaaaacgaacaaccctatcaacaagtggatgaaggatatgaacagacacttctcaaaagaaaacatttatgcagccaacagacacatgaaaaaatgctcatcatcactggccatcagagaaatgcaaatcaaaaccacaatgagataccatctcacaccagttagaatggcaatcattaaaaagtcaggaagcaacaggtgctggagagggtgtggagaaataggaacacttttacactgttggtgggactgtaaactagttcaaccattgtggaagtcagtgtggcgattcctcagggatctagaactagaaataccatttgaccccgccatcccattactgggtatatacccaaaggattataaatcatgctgctataaagacacatgcacatgtatgtttattgtggcactattcacaatagcaaagacttggaaccaacccaaatgtccaacaatgatagactggattaagaaaatgtggcacatatacaccaaggaatactatgcagtcataaaaaatgatgagttcatgtcctttgtagggacatggatgaagctggaaaccatcattctcagcaaactatcacaaggacaaaaaaccaaacactgcatgttctcactcataggtgggaattgaataatgagaacacttggacacaggaaggggaacaccacacaccagggcctgttgtggggtgggggaggggggagggatagcattaggagatatacctcatgtaaatgatgagttaatgggtgcagcacaccagcatggcacatgtatacatatgtaacaaaactgcacgttgtgcacatgtaccctagaacttaaagtatgataaaaaaatatatatatatataaaataaaataaaacgaaactaccatccaaaaaaaaaaaaggaagtgtgtagcatgtcccccttctctctcctcctcctgcctgccacgtaagacgtgcttgcttccacttcgacttccaccatcatagtaagtttcctgaggcctccccagaagcagaagcctgtatagcccacataaccgtgagctgattaaacctcttttctttataaattatacagtctcaggtatgtctttatagcagtgtgagaatggactaatacatcaaccaaatgaatgtcatgttactgaagagcctgacatcatattagggatatgataatatcacattacagcataacatactactaagatgcttcctaaggtaccactttaaagaaaaaccaagatacagcctatgtttgtgtaacattgtttttcactttctacaacagcagggtttatttttatttttattttttattttattttatttttttttgagacagggtctcgctctgttgcccaggctggagtgcagtggtgcaatcttggctcactgcagccttgacctcctcaagcaatcctcttgccttagctttctgagtagctgggaccacaggtgcacgccaccatacctggattttcttaatttttagtggagacaaagtcttgctatgttgcccaggctggtcacaaactccagggttcaagagatcctcttgccttggcctcccaaagtgctgggattatgggtgtgagctaccacacctggccaacaacactaatttctatttcctactttgtttagggcccaaatcttggaattattttttatcactctttctcacattctacatctaaaccaacaggaaatcctggtatcttcaaatcctgtaccttcaaaatacagaatcagatcagctctcatcacctatgcttagattatggcaacaacttcctgataatctctttgctgtcactgttggcactcccttccccaaaatctcagcaatcagagggatccttttaaaacagaagtcgtatcttgtccttgctgtattcaaaattctctgctggctcccagctcacacaaagtaaaagccaaagttcttacaccagttggccgaagtgcttacaaatggtcacaaggccctttgtcattgtgcccctgcacctgtttatctctgtgaaccagaactatccctctctctctgctctagtggctctgctatatgtttctcttcctgccccagggcctttgcacttgctattacctctgcctggaatgctctcctcctagatgtccatatggctgactcagcagccttagggctctcagacgtcacgttctcagtggccactctcttcttccttgtccatactgtttaaaatggctaccaggctgggcacagtggctcatgcctgtaatcccagcacttagggaggccaaggtaggcagatcacctgaggtcaggagttccagaccagcctggccaacatggcaaaacccatgtttagtctctactaaaaaatacaaaaattagccgggcatggtagcgtgtgcttgtagttccagctactcaggaggctgaggcaggagaattgcttgaacccgggaggtggaggttgcagtgtgccgatatcgtgtcaccgtactccagcctgggccacagagtgagactctgtctcaaaaaaaaattaaaaataaataaataaaaataaatggctacccctagtatctcctttacctgctataatttgcatagattttttttttttttttttttgagacggagttcactcttgttgcccaggctggagtgcaacggcacgatctctgctcaccacaacctccgcctcccgggttcaagcgcttctcctgcctcagcctcccgaatagctgggattacaggcatgtgccaccatgcctggctaattttgtatttttagtagagacagggtttccccatattggtcaggctggtctcaaactcctgacctcaggtgatccgcctgcctcggcctcccaaagtgctgggattacaggcatgagccactgcgcccggccaatttgcatagatttttaaaatcatctgacacacacacatacacatacatatattcacacatttatttgttatctccctgactagaatgtagggttcatgaaggtaaggatttttatctatttggtctactgatagatctccagtgtctagaacgatagtacctgacatgcagtaagtgccagtaagtatttcttgaataaatgaaggggaaatattattttgaattatgtatttacaaaagcaaagatatacacagaagatcttgtaatggctcaggaaatcagacatgttttccttatactggtattttttggtctttttaaaaaattagctttatccatttattaccttcaaccttcataattaattggggataatctaatatatcagttcattaatgatgtcaagacaatatggcacaggaaagaaatctttctttggggaatataacagtgtgtatctggtgaaaaaataaaagacgggggaaagaaacatcttgtttttgtgttgcgtgatctgttggcgtaaacgtacatatgcagatcgtgtgaagcctgctttggtgtttcctgcttttgatgtggtccccctcatatttgctttgcaggttctcccttagaaagtgttttctctataggcatgcacccaggaaaaaggaacgttcatccaggcacgtgcaaagtcctgcaaactctaaagattcatttgtaaaatagtcatgttataaatctcggcagacaatccagtatttgtccagctagaatgacctctgcacccaggagaagaggaggagggaggggggtggggaggaagggcctaacaggcacttggttcagctgattgcaatttctcataaatattcagcctgtgtgatgctgttgggatgtgtttgaagcattaaggcatggatatgtcatatctcattttccagagcagctttggatggcgtgtttgaattaattcctaagtcaaaggggacaccttgaccctgattttccttggacagaagttagctcccacctcttcctgaccctcactcttccttgctcactggattcctccatgatccccaacccactttttagaacacaaagccagttttagttccatcttcccagtgctctctgtggccctcccactcatataagatcatcacattttatcttcttcttttcctaaggaggacaaagactctctccagtgaagcctttctcttctcctcaggcctctccttcctgactcagccttggtttaccactgagatttgccatataccatacagaagaacaaaaacgttaccaattattggcaggttttttttgtttttttgttttttttttaaccaaacgtcaagttggtgatgaagttatctggaaatgtcaaccaaacccagaagactacacaagactacaggagaaggcactctggggtgagatgatactaacacacaatacccattgtatatacagttctaagtgtttaacatatattaaccctcttacttctcaaacaatctaataaagtaggtactaccattatcattcctgtttcacatagcaggacactaagggccagggaggttaaatggtggagttggagattctgatcaaggaattttggctccaaaggtaattcaaagacttgcccccaactgtgggccaagagctcagattccctgactgtctgcattgtattctttcttatctacctgaattcagcagctaacactgcgttatctctgcctttggtggaataccccataactggttagcatggaaaagtttaatacagtttaaggcgagttttcagtactggttttatttcctatccatggatgttaaaatgaaatttgccttcctcaggctcaccctagaaagtgacagctggctctgataaaaatggaaccatctgtctgtgagcctggggtcagggtatgaaaagacaccctggagattgttggtccatcaggtggtgggaggaaggtgtgggggttgaagcttgccaatgaatcttcagagtgtgtgattccccttggcccttgtatagccagtggagggaggtccctgtttgatttagaaaggtgaagctaaccatccttggggctctcagttgccagggtcagctgtctacatatcttcgttcaaataggatttcgttaggaaaactctctagagactgtccccaacccagccatcctccctctcttccatctacacctctgcccagatgacctgttagataaatatgaccttctgggttttcagggtctaaatgcaagatctaaaatctatcaaaagcagatgcttgcttttctagaaacaacacgagtccagatatagggcttcaattggggctggagcttgaggcctatgttcctttcctcttcccggagctcacaggagccatccaacaggacagctcagctaatgaaaggggatcttggcctctctccatatgcagtgctcggccttgtcctcagccctcctcaacccagtcatgaacttttctcttcactgtttcaatccaaattacattgttagggggagctaggaatcaattaaagtcagtatttccttgtccatccattgctgctctggccacagactaggtactcagtaaatttgcccagctcactgagaattgaatctcccactacaatgggattttgaaaaaatccatcactcatggcctggttagcacaatctttgcttccactttcattgggacatgctctgcctaaaagcgaagaaccacagggcagtaggcctatgctgtttggcaaaaaaggaaacagcaaagaagacaggtccatcctcctttcttctggagtcagcactgaattatttgtggtaaagtccctgctggtggagtctctgggcctttggctttttactgtttggactatttgtattccttagcatccccaccagagagagaatcttgggcaagaggtgacgtccacaagagcccattcacttagtgactgagagctgtaagggaaggaaaaggagggcaggaagaaaggctggaattaatgctttaaatgaggctaaacaatttacccgcagagttttcattcatcctactttttgtctgtttctatcacatgtcacccaccaagaattgactctatgactttacccctgtgagttgcagggaagaaaagggtgctagctcctgctctggccagattccctctgagcgacttgtggagtcttactgggggattcaactcttcttcacctcaatcagcagtaaagcctacacagacactgggagcatgacggcaagagaaggccacccacctctctacacccctagatgacacactacaggatcccagtggagtatacagaaaattccaaggagaccaggggccaggggttctcggtggaaccatggcagggaaagtatcagagacagaaatatgagactctgggtagtgataaaataaattgttttaatggaaggctttctgagactgcaactttttcttctgctatcaaacagccagtttccctgccctggggtttcttagggagtgcacggctgagctcctggcccacaggaagctggcatgttactctgacacactacattcagcccctccagggatccagaggtgtgtcttaatgtcaggagactggagttagctggtagtcagtccaaggtatgctgtccccataagtgtccaggcccgcgggagaggacaaggggcttcacttcccacttaggatgtttctccatgaggggagaggggacagatcacttttgaaattttgactctgacctttacaaagaaaactaatagacactttagtattatatacagggcagaggggagaggacacagaggggaaattgcacttaattacagtagtttatagtttacagccattggacaaatttacttctttaaaagaaatctcaagatcatttgggatgggggcaggggagggagtctgtggatatttacagtgtgtttggctcagttcaatagcacatgtccttctctcctcatttcagtaacagattcaagttttcgcatcagtttgttcgatgaaggatcacaacatagacagtacggctttcttgcttcctcttcggaggttccttgtctcccacctccaggacagacaggagtccttgacatcgtgggagaggcattgtggcaatactgcatagaagggaaactgggcttcgggctgcgcctcctgagagtggattgtctgaggtgccagcaggacgtccgtcaggtaagcagggacctctcgcaggtgctggtcaggtcactgggcttttccatgacagctgcccagagggtgatggtgtggaaaacagggtccttgttgttgcgcacgaagtaagtggtgtgtgggcatcaccaggcttgtagaggacactgcagagagagaggagagagggtgctcagctgtgtcatttggcagggtcatgggccattagtttggcttctctaagggagatgatgcccaactcaaccagcaaagagcagcaggtggagggctgggggcctcgtgtctgctcagttctgcagttttcatgctgaggcacacttcctgcaggaaaacccgggagccggctttcctggccacttcagaagaaagaagtgaattgctggggaccttgaagtagtcttaacttgctgacctgaatcctgaagctgggctcctctttctgtgacagtggcatttatagagtgcttagtgtacttgaaaaggcagctggatggtgagctcttgcctctcgtggaagcaagggtctcttcctaagaccgctaagagcagaggcctcctatactaatgcttctcgaactttaacggacccacaagtaccagagagcctgtgaaaatgtggattctggtttaattctgacttgtaggcctggggtgcacctaagagtctgcatttctaacaagttcccagggtgtgccagtgctgctcacctagggcagcaaggccagaaagcacacgagaaaatgaccactcaaactactcatcaggaaggagctttgcaaattgcaaagtgctttctacgggtttcttactttagcataagaaactcagaggaccagggaaaggatccaaaggctgaaggcctctgatgccatccttgtgggtgggccagggcaggagaccccagaatggctggagaagccctcgagagaagccacctcacccaactcagggcagccttgccctccagtgcctgggccttattcatttgaactgtcatggagtgtcactgctttccttttcacttctggggagtctctttttgtctccctgtgtctcctccttcccttttgcttttgccggcatctaaggttctgcctttgacttagtggcttattctctcaagatccccccaaacacacacacacacacacacacacacacacacacacacacacttacacctaccaataccactaaaggccactgttatcgcattgatcagtgctccaaccataaccctatatgaggataccattatgtctatttgacaaattaggaaaacaaggctaaaagagagtcagtgaattgtccatggtttaagaactaggagagtgtggagccacagcttcaaactagctgtctaggtggccactcagcatgtgctctttcaatcatgcttggaggtgaggagccttctactaagctttgtgctcttggacaagttactctctctgtgcctcagtttcttcccctataatatgggagttgttgtgtgattagatgagtcaacacctgtggagtcctgagcatggtccttggcacaattgttattattaacatggggttcttcggcccaagcccctgctgctcctcagtactcttaagagtggggctgaaggcctggcgcagtgcctcacgcctgtaatcccagcactttgagaggccaaggcaggtggatcacaaggtcaggagatcgagatcagcctggccaacatagtgaaaccacatccctactaaaaatacaaaaattagctgggcatggtggtgcacacctgtagtcccagctacttgagaggctgaggcaagagaatcgtttgaacccaggaggcggaggttgtggtgagccgatattatgctactgcactccagcctgggcgacagagcaagacttggtctcacaaaaaaaaaaaaaaaaaaaaaaaagaggggggctgagcagtgcgtgcatgtgaggagacaggcttctgacccttccacattcttgagacgttggtcagggtcctctgataccctttgcctcctcttcctcccctggcccacccccactctcaagtctctttacttcccactatcagcctttttccaattttcagatttcaggtggaggagagagaaaacggcttgtgaccttgcaggtttcaaaagaagagcaaacaagaagggcagataaggagacgccagtgagattctatggcctgtcattagggatgggcttcccagctatcaaatgtttgctcacataataaaatggtggcagagcccaaaatgttgtcaaaagaactagagttatttgcctccttcagagtctaaacacaaacatctgataaggggtgcactgtggtcccttagaactggaggcccagcacacgcagccccacgggggcctggcccagaagatctctgagagaccgcggggccctccgtctgaaaggtgtggtagctgtggcaaatgtgaaggacatccttattctaagaggatttgttacataatggtaagagctaacatttatcgacatcctactgtgtgccaggcaccataccaagggcttcacaagcatcactgcctcgagttcttacgtcgaccctttgaagtaggtgattatcgtgaattcatttaacacgtttgagtgcctactgtgtacttggcacttttttagacactggagatgcagctgtaaacaacaccctgcccacttcttcacaggctttacctcctagtgaaggctttgaataataaacaagtaaacaaatgcgtgcacacacacacacacacacacacacacacacacacactacaactttaggtggagatgagcactccatagaaaaataagcatagaggttagggcagcttgaggaaaaagagattaacttagatatgggaatcaggcgaggcctctttgaaatggtaacatttgagctgaatgaagtgaaggggcaagcatgtaaaaatgcacagaaaaaaagagctccaggcagacaccacaaatgcaggagtcctggagtgggatctcttcagccctggcacagctaaagctgagcgggtgatggagggaggaaggaggtgagaacggcgacactggcaggggcataatcacatagggtcctgtatgtctctgttttagtttggttgtgatggaaagctattggagagttttgacaggggattgacatgcttgatgtctctttgtaagagatcactctggcgaacagcccccagtggggcaagggtggaagtgggagacaggcaagggccacctaaggagatcagggagagacaagggggcctgggctgggactagggcagtcctgatgggagtgtgagaagaggtcagatttaggatgtattctgagggtcccctagtagaacttattgagagactgatgtgatgtggagagaagaatcagggatactctcagctctctcacttgaacaactggtaccagttttggaaatggagaagcccatgggggaagcaattttgataggatgaaatagggcaaaatgaagagttcctattttaggcacgttgaattcaagaggcttattagatattttagacatgcgtctgtccctgccgaagcagcactggatctgtgagtgagcactcagtagggaagaccggactgtacacagaattacaggaaccatcggcgtgtacacttgacctaaagccatgggactggaggagatcacccaggagtgagcacagatgagaagaggccaaagaatgaggcccggggccctccaacacataaatattgggaagatgagttgccagctgaggagatgagaagtggccagtgccgtagaagaaccaggaatggtagtatcccaaactcccatggaaaaaaggagggagagatcagctgtgtcagagacagaggttgaaaagtaaccattggtttcagcagcatggaggggatcgtgagctggacacagtgaggcgtgaggataaaggccagtctgcagtgatctcaagagagaattgagggtgaggaagtggagacagtgaggacagataagtcacttctatgaccatgaacttatgtgagattcattgtggctccattaattaaaagtcatgattataattccggttttacagatgagggaagtgtggcctggagaggtgataagtaagttggccggggtctcacaacagcaaggcttgtgctcttcacccctatgtaagagcacttctttcaaccccctcaacacggggaaataaatgccctttgccacgtaagacccttttcccaaactcagagccgctcaggggtgctagcaggggaagccaagagtgacccagcttccatgggctgggtgtttcctttgggacatgcgctgagtgaagtattttacaggtcttcgtgcagttagtcctttcagtgatcccatgaaagaggtatcattatcttcattttacaggtgagcaaacagaggctcaaagaggctaagacatttctctgaggtcacacaggtagaaagtggtagaatgttgagcccagatctgcctaactcccaggtcgatgctcccaaccatcagaacactctgcttcctcacccagtgaagaagctgggagaggaatagccgaaggggatagatgatgaggccacccacctgcccccttgtcagtgccctgactagttactgctctgggggccctctcttcaccttcccataaactaggaagtcaagcagcggggagagaacactgtggaaacaggagttggctcacaacctgcctgcacttgttctaactgaggtcagtggttgctgtggtcttgtttccagactagcggggcattgttgaactcaggcacaaacccactcagagataacttgccagcacccaagagttgagaaggagggagacgtatgtgctctggaagggacagatggcagtagatgcagaaggattcttggcgcgagaagtcccagcctggggttcctgacctgtaatccccaaggcccttggggcatgtctgccttgacaacaggaagtactgggatcagacagatacaagtacaaatcctggctttagccttatacctgcataaccttgggttgttattatgggtgcttaaaagtggatattggaagatgaacgttgtttaatgagtttggagtgagaaagccagtctggaagtccagctctggaatttatgatctgtttgaacttgaccagatccatacccatctttgaacctcagttttctgctttgtaaatcaggtataaaaataacgaccttgcagaatgggtaagagggttctccaggaaatgtaagctagaaaagcatctggggtgctgcttggaaaatggaggcatcaaaaaacacgggttctgcattcattcgttcgttcgttcattcattctttgttatttactgaacatctaatatagcccaggcatttggctaagcccaaagggtatgggtgctttgacaggccctgaactatttgcttttttcctgggaaataggtgagcagggagtctgtgtatcagcaggagaatgggaaacagggatccggagcccaggcccaagaggtaggatgtgcttgagagatggtagtaatcctgagacattttcttctcccagcctcctttgactgcatgtagaccaagcactgaattggatattgaaagagtcactaggccgggtccagtggctcacacctgtaattccagcactttgggaggcagaggcgggcagatcacgaggtcaggaatttgagagcagcctggccaacatagtgaaaccccgtctctactaaaaatacaaaaaattagccaggtgtggtggcctgtgcctgtagttccagttacttgggaggctgaggcgggagaattgcttgtacccagtaggcggaggttgcagtgagctgagaccacaccattgcactccagcctgggtgacagagtgagattccatctcaaaaaaaaaaaaaaaaaaaaaaaagagtcactggaaggggagacaactatctcctaaaggatcacagacgggagagaaaacagggagggggctaccactttgaatacttgactatgtactaggcattctgttaggcacattgaatattttgtgagatgggggtgggattttccccatttatagatgaagaaactgagtctcccaacagggaattaactgcccaaggtcacataccagggggtgatgaagctgaaagtagctcaggtctgctggcgtttcctaccactgtacaatacctctaaaatagcactgctcaggatgtgtccctttgactcgagcagggtgcacgctaattgcccggttcagtgcacacatcagcaagtgaaatgctctgagaagccctgcccagtagcatttaactttgtgtaatccagcagttcccccaacatatttgaccaagaaatccttctctcccctcactcgtatgtccttgatacctagtgatatggtttagatgtgtgtcccttccaaatctcatgttgaaatacgatacccagtgttggaggtaaggcctggtgggagatattggatcacaggggcagatcccttatgaatggctcagcgccatccccttggtgataagtgagctctcgctcaagttaattcacacaagatctggttgtttaagagtctgggatcttccctttctctctcttgctctttatctcaccatatgacatgcctattccccctttaccttctgccctgactgtaagcttcctaaggccctcaccagatgcagatgctggcaccacaacctgcagagccatgagccaattaaacatattttctttttaagttacccagcctcaggtattcctttatagtgatgcaaatggactaacacaaaaaactggtcctgggagtggggcattactataaagatacttgaagatggccaggtgcagtggctcacgcctgtaatcccagcactttgggaggctgaggcaggtggatcacctgaggtcaggagttcgagaccagcctggccaacatggtgaatccctgtttctactaaaaatacaaaaaattagccaggcgtggtggcctgtgcctgtaatcctagctactcaggactctgaggcagaatcgcttgaacctgggaggtggaggctgcagtgagctgagatcacaccattgtactccagcttgggcaacaagagcaaaactccatccccccgccccgccgcccccccccccccccgcaaaaaaaaaagatacttgaagatgtggaagcagctttggcaatgggtaacaggcagagattgggagtttggaggaacagaagaagacaggaagatgaaggaaagtttagaatttcttagagacctgttaagtggttgtgaccaaaatcctgatagaactatggagagtgaaggccaggctgatgagatctcagatggaaatgaggaactgattgggaactagagcaaaggtcaccctccttacgcccaggcagagaacttggctgcattgtgtccatattctagggatctgtggaagtttgaacttcagaatgatagcctagggtatctaacagaagacatttctaagcggtaaaacattcatgatgtggcctggctgcttctaacaacccacagtagctacggaagcaaaggaatgacttacatttggaatgttggaatttacatttaaaaagggaagcagagcgtaaaagtttggaaaatttgcagcctaaccctgtggtagagaaggaattcaagtggcctatggagcaacagcttgctagagagattagcttgactaaagagggctgcatgctatagccaagacaatggaaaaaaggcactgaagtatttcagacatcttctaggcagcccctcccactagaggcccagaggcctaggaagaaaatatggttttgggggccagaccaaaggccctgctgccctgcacagccttgggacactgctccctgcatacatgctgctctagcttcagccctggctcaaagagccccaggtacagctcagaccaccactctagagggtgcagtctgtaagctttggtgggtttcatgtgatgttaagcctgcagatgcacagaatgcaagagtgaaggaggtttggcagcttccacctagatttcaaaggctttatcagaaagcctgggtgcccaggcagaagcttgctgcaggggcagagcccccacagagaacctccactagggcagtgctgaggggaaatgtgggattggagccccacccgccccacacacagagtccctaccaggatactgcctaatggagctgtgggaatgggcctgccaccctctagacctcagaatggtaaagccactagcagcttgcaacctcagcatggaaaagccacaggaacagagctgcccaaggccttgggagcccacctggcacaccaatgtgcccaggatgtgggacatggaatcaaggattattttggagctttaagatttaatgcctgccctgttgggtttcagacttgcatggggtgttacccctttcttttggccaatttatttcttttgggatgggaacgtctgcccaatgcctgtaccaccattgtattttggaagtaagtatatagtttttttattttacaagctcataggtggaaggacttgctcttgagtctcagatgagactctggactttgagttaatgctgtaatgagttaagactttcagggactagtgggaagggatgactgtatttctcaatgtgagaaggacatgagatttgggaggccaggggtggaatgatatggtctggatgtgtgtcccctccaaatctcatgttgaaatgtgattcccagtgttggaggtggggctcagtgggaggtaatggatcatggtgatgggtgaggaattcatgcttgagttagttcacgtgagatctggctgtttaaaagagtctagggctaggcatggtggctcacacctgtaatcccagcactttgggaggccaaggcaggcagttcacttgagcgcaggagtttgagaccagcctgggcaacatggcaaaacaaaaaaaatgcaaaaatttagcctgtcattgtggtgtgcgcctgtagtctcagctactctggaggctgaggcgggaggactgattgagcccaggaggttaaagctgcagtgagctgtgattgcgccactgcactccagcctgggtgacagaacgggaccctgtctcaaaacataaaaatataaataaataaataagagcccagggcagggcctctcccttctccctcctgctcacactctcaccacgtgatgcacctgccctgtctgcaccttccgccatgcttgtaaaccttctgaggtcttcagcagaggcagatgctggcatcatgcttcctgtgcagcctgcagaaccatgagcctttgaacctcttttacccagcctcagatatttctttatagcgaagcaaacagacatcgctataagcaataaatctgaacacgccagaaatgaatttgaaattcctgttggaatataagaccttaaaacaaaaccaaaaaagcagaattgccatcaggtctctttcagaactcacttctgaccctctgccttaggaacagagtttgtacaaactgtcttcaccttgggtaccttctgctgtcaggaggcagcacctttaccctcattttacttcactgtgcctttcccattcctccttctctttcaacttgttggaagaacgtttcctgagtggaatatggcaagtgaacttattttttactcttgttcctgaccacaaagacaacaagagtggcagcagttaccgtagaattttaaagatggtagtggaaggcaagtatgtggagtcaaagaccaaagcctgaaggtccagcactagaatttatcatctgtgtgaccttgggcaggtcactcttcatctctgggttttagtttatttctttgtacttaggaggttgcagtaaaaagaaaacaatgagacaatgttcatgagaagtataaactgtaacgtgccacgtgagtatttttcatccttactgagtgtaataatcatcctcatcatcgcagaaatgagtctattgccagactcctgaaatgtctggggacatggagacaatgtcacagcagttctgggaggccactcatgcagcttcaaggttggctggccactctgtccaatggagaggagaagccagtggggggctggtgcagcgtctcagggagcatcttaaagtattttgattaagagaccatttcctgaattcagacgacttgtttcaacaagcaaccatcaaagtcaacttgggaaagacaggaataattaatcatggtcctgtctggggctgaccaagcggcagatggattgataaacctttcaaaggggaaggtattcccaaggagggccgctgcgcctggctgcccccctgattgagatttgtgagcacagataaatgttttccctgcccactacaaagagtgggaactcgcacgggagtcgaagggcagggtagtgaggggttgtcctttcatcttctattgggtgagagaagagtggcaaagcaggtcccacacacctctccctctacccccagctccagagcccagctgccctggtcgtgtgtgtgtttcagtgcccaagacaccagttacttaatctacgcaagcttgctgaatcctcagaaaaagcagatgttacaactctcactttaaagatgaagaaatgaaggctcagggaggtcaaggtcaccaagcaaatggcagaaccaggaatagaacccacctgctccactgcactctagggctggaaggagatcggggcaaaggaaaggatagagaaccctgatcccatgaaggaacctcctgggaagcccatggcagtggatgaagtgtgatttgcagggctcagatgaaaaaaagaccatcaacaagaccaaattctgagagcttctgacatgaagttcaaggttgtcacctacttatctagtaatcgatagaggccaaacagttcccacactgcacagaccccagctactaaaaggtctcattgtgttactctggaatcatcacctgtgttcagacatcttgtcctgttttctaactctcggtgtcttcttgcagtccagctgtccaagctgcagcaatgagcctcgccatcagctgcctgtctactattccatcacctctattcagaggtgggacttagtcatcaactgaaacagtgactaagcctctggattccccactttcagtgcagcaggaagttgattctaaatttcttgataaaaccccaagtggatgcttacccctggaaaagccaggctgtctactggggagtccccatgggttgacacaactgggtcattcccagagcttatggcattctgggtccaggggaatcagcctcaggacctctgacttcctactcactttctccgctgactactttgtggatcctcagggatccctcttgcaaagcatgaacctcagcaggggatctgtcctcctgagccctccttggaaataccttttccatggaccattgatcattctattagggaacactcaatctaaatgcctaagcgctctatgtcatccagtctccagcaacctatcaaacttctgtccttgtttagtgctcttcctggggaatctgggggagcaataagccctttcagcctgtggcccttttttttttgccctgggaccttaaggattccctttgcaaacaacagggagcctcagaaggacctaatttctggccgagtccatgcttgccacaacctctgcacatccatggccttatcacaccctgcccacaccccaacccccgcaaatcctgctggcattacctgtttacttgaagacatgttggtgagtgtactgatgctgctggtatctgtgaccaccattgcagatggaaaccgggaggtgtgggaatactgggggggttcctgcttgtgtgcgtacactggagagacagagtgaagacagaatcaaggtgcatacacaggcaaagacacaggtacagagcccccatcccacaccatagctcccatctcctcaggtagataaaagggctggtggttatagtggggatttctcatattagttatccataagattcatgtaaattccaagtcacataaccaactcccgaaagcatgtggatgcttggctgtgagggagagaccacctgctctcagaacacagggcctaccagggaggcctccggtacggaacgggagcaaaggtcactggctgttgcctcggcttgcccttctcatgcagggaggcaggttatttcctggtccagggcaccatgggctctctcttcatgggcggccaggcctgctgggcctcagcagtccacaggtcgctggtgaccactctctgactatcccacccaggcctcgccactgaggaagcctggccaggtgaagggatggggtaagtggggagcacatcaccaggctctgggaggaagggaagtggggcacatgtggtctcagactctgctacaggctgtggcagattttcagaagccactaaaatgtgattggaatgtgagatggtgctcagaaaccagctccacaggcccgagtggggattgagccctgaagatagaaggctggacttggctgttctcccccaaacccacagcttatccgatgcagctagggaagaaacacaaacctctttcaccatcattgccttctaagagtccctttataaataatctttataattttttatgcttaccaaacgcagtttacccctatgtttatttcatattcataatgactctaaatgcatactatttccattttatggatgtagagattggacttagagtggctaagtaacttgcattaggctacacagctggtaagtatcacagccaggatttaaatccaggtctgtctgatctaagactagtgctttatactgaacacttccttggggtttctgaagcagagaagccacgattcctccccaaactcctgtgtcaggggctatagccagacctggccagaggattggaagcctgggactcaggatgaaaggcagagaaacagaggatgggattggatgggaaataagtggtcgaaaggtaggcttggggtaggtatagaaattggatatgagaaacagtctgtgtgcagagatgcaggggtggcatggaggaagaaactctaatgcccaggatggcatgccactggtatttttcacttgtgttcatggttcttgattagagatgtttggggtgtataaattggaggacacgggactctagaagattcttctcttttagggaaggcaaacaggatgcaaattagatgccaattgtgatcatttgataatggctgcttggaagtttagattgcaaaggctaagttgaagttcactgggaaaaggtgctggtggtttatggacgcgatcttttccagaggtgttggaatgggaaattggcggtgtgtgttccacatgctgtctggctccaattccccttcatctgtaggcctacactgtcctcttcaaacccttccctgggaatctcaggggtagagaagaggactagaaaaggtacagcaacactcaagagttatgcttgagaaattgtcttagtcggttgatcataggcagggaaaagtgaccaagccaataaacttccgagaaagttcagacccagagagggaaagtggttggccactgagggtcctgagtgctccctccctccacatgcccgtgtccttactgtgtgagttctgcagctgagtcacagctgccatgaagggctgctgggccatgtggctgcctgggctctgctgcatgaggggctgctggtgagggctgtgcagctgctgggagaactggacgggctgcagggctgccaggctgccggccacactgttgatgacagggacactctgtgcttgggaggtgttgaggcctgtgggagcaagaggaaaagatcacagacagctcctgggataaggagaggtggatggatgccatcatttgagcccccgctcaatgtcccagtcaccgggctgagcctgttacataggagattccatgggaggcaagtgtaaagaaacggagacttggagatattaatttacttgctcaagttccacaatgagttgtgggttggagatgggcattaaacagatctgattaaagcctgagagtctcccagagtcatcctgtgacctcccaaacttagctctcttgaggttaccagggctttggaaaagctggctctacctgcccactccatccatgccaggctgtgagagaggcttgccctggtgcccgcagggcagagttaaagatgtccacactgaggcacaggttattgcccagatcggtctgtccagtagagggcaggagtgtgcagggacccaaattttgactaaaaacaacttccatagtcccgggagtatgaggttgggagacccttatttagtagactgtacaaagacccccagagaaatcaggtgccaactcccttgactgtaacagagaggggagaaaacactggaactcagccagtctgcgaggcgggcatatcttatgtggcagcatagggcttgtggcactaaaaggaccaggttttagaaagaggaagtagtacattaaaggttgactcttggcatttatagtgggtcttcccatctttctgttctggagatgtcagggcctctgtaacttggaactgtgtatcctgaggcctctttagaacccgggccagcactctgaggattggatcccctggtacccatgctctatctcctccctgagagcgacacggaggaagacagctaaggtaggatcggagtggggacaggacgatcaggagagaagacacctggacctgcttcctggggtcgattgtgttcctgtgttcttgctttctgggaagttgggggaagaatgggatgaagaaggaatccagaaaaaggtctgttttaggtggatgtggaagggacacctagagaggctttcctgaaatggagacggtttcataggcaggtttgagggaagtcatcaatggagataacacggagtcctcaacaattgcctactcagagctttagctgatactgttatcagaaacctaaaaggcgagacccctgagcagaaaggacaggggatgaatcctgcttctggctctcctgggtgggggctgggggtgccaccctctgatcaccctcagaacagcactgtctccagttccccagggggctcagcgtctcctcaagccagcatctcaccagataccctgatgaccgatgaccgtgtttccctttcctacctcctgcttatggtctcagtctcccagaaagctccatgaatgtgccgtttttgagaaatctttgagagcactgctgctgctctttttgagaaactgctgcccaaaaaagcaaatgatcctgtctagagtggatgacatttgaaggcatagttctgaaacctgcatgtgcttcagaaatcatctgggggagctctttaacaaatatacattcctgggccccacccaagacctaatgagtcagaaccttcagaggtggggcccaggaatcttattttcaatgcagtctgtgatcctgatgtgcctcaattccaggattgagagcctctgatgtcattccagctccctcagtgggtaagtcttgaccttttcatctgtttctgtttctgggcactggttcttgcttgggaagtatgctatccagtccagggaagagatgagaaagagaataggatgaagaggtgagaatgagtagagaataaggaattggccctgccaaataatttgttaccaccttctccacaggcttccgcaattctgaggcagggcccatggtactcaacacatcagtcagttaaatgaagatgcctgcaaccagtttctcatcctaacactccatagtgtaggacctctgtgtctcagcagtcttctggtgattctcaccatttctcatgctctgtctaccccaagtgtacacagatatgtacacacacagccatccttctgaggtcagtgtgcactctggtgcagcccatctgaataggagattaaggagcatcgtgaaatgatagagaaatatgagtagaggaaattagaaagaacaaaatggaaagatgcagactagccccagggaaaattttaattcagatagtatatatatatatataactgtatggcagtgaaagcttagaatggaaagaaagaagttaagtgggacagtttgtttattattttggttgcagaaataagtggaatatcttccccacgggccttttaatcaaatcttctaaatggcaaacaagctggttttaggtatcttatctcattccaaactctggtattagtataattaccatattccatataccagagggcccagtcaaaaggcaatacatttaaaatgatcatttatattgtgagttctctaaatgcttccccattcccattttccttctgccaaaatcaatgcactgtgtgtcaatttccaagcagctaaggatagagtgagagccacacatattcaataaatttgtgtgcctccaatgggcttagccctgttctgacctcaaaggatgtgtaagtcattctcttcagaagtgagaatccaagttccgaccctagctaaagctgatttagggagagaagagggaagaaagaaaaaggcagaaacaaaacaaagaggtggccaacatgagccctagatacaaggaaggtaagaggacaatggagcaatacaaggttgaaagaaagatgaccaatgtgttacccttagatctctcccaagacatccagcaatacatccaagggtcacaaggatggttttgagaaacaacgacacctgagctgtcatagtgaagctggaaatatgctgaatactcatcaacattaaaactctcaaagagatatccacaaccacagttcccttcagccttctcatgcctcaagatggcccatgtatgggagggcacaggcttgctgttgaatatgagcctcctggagctggagggacctgatccatctccgtgtcttcaggcgtgtgatgtgccaaagcaagctttttctccttaaagttttcaaagctctcagatacaatggcagtttccctctggatcctcccttggtgtattttcactgctggccaaggagatttcatataccacacaaaactccccatttagaaggaaacctgtcattcttacttcatcatcaccaaacagaaagaacctcctgaaaaatctaccacctacttagtgataggaatgaactcaagacaaagtgtaagctacgatgttatacatattcatgctttagagatttataagcatgttcatattcactgtcagttgatcactttaacaacctattttatagatgaggacattgaatctcctgaaggttcaatgatttgacccaggatgcacagctgctaaactgtgaccaggatccaaatccattccacaattttctcttgttttaggctaaacaatccaaatattggatttaaggagacagatgagaaactaaagaagttaaaccaaatctactagtcgtgggtgagtttgaaggagacctacagttatttttcaccacattaatttgcttcccattcttcttctccctgcccccaagttttccaaccaagaatagaacttactttgtgcaattgccatgactccagagaggggtgtcatgatgaggttttgagattgctggggattatggtgggagaggctgtggatattcgtcaaggtgctgactgggggcaaacctcctcctgagactgagatctgatggagagaaaaaaacaagagaaacatgggtggacttggaccacaaagagcagtttccaacacgatgtgacttagcgattccttggcatgactagttctcaaattcattccttcattcactcaataacaattattggctgggcatggtgcttcacccctgtaatcccagcactttgggaagccaagacaggaggactgcctgagctcaggagttcaagaccagcctgggcaacatggtgaaatcatctctacaaaaaaagaaaaaaacacaattattaagtgtctactgtgggacagacactattctaggtgctggggatagagcagtaagtaaaacagacagtgatccctgccctcatggtgcatctattgttgactgtctgagttactagccagcttcagaaattactaagggttgggggagattagccattacaaggtttctctactttttccacatctccagtacacattacaaaattttttttcttttttggtcaaggatcctatattgtaatcaccattatattttaatgacagattagtatgagaaagctactgattttggtgtatttactttgtacatgaccacttcactgaatcctactagtgtcttttcctcattgatttttttccaagtatgtaattgtaatacaagcatctgatggtaacagggtcttttccttgctagtactgatatgtctacatgtcctattatattgcttagaacttacagtattaaacaataacagctgtaatagatgtgcttattttgcttctgatgttatcagaaatgtttccaatgttttcccattaactctaattgtaattataagggcgcgatcagttttaaacacacctacactttttccatgatacattagtttactacttatagtttcaaaataatttttttctttttttgaggtggagtccagctctgttgcccaggctggagtgcagtggcatgatctctgctcactgcaacctccgccttgtgggttcaagcaattctcctgcctcagcctcccgagtggatggaaccacaggcacctaccaccacgcctggctgatttttgtatttttagtagagacgggatttcactatgttgaccaggctggtcttgaactcctgacctcaggttatgtgcccacctcagcctcccaaagtgctgggattacaggtgtgagccactgtgcccagcctcaaaataatttttaaagttattatgaagaaaggactggcccctcttattctgaacccaggcgtgcttgagagcatcaggaaccccgagaggtgctttagggttaggatgcaccagatgtctgagtaactcaactttccttcttccatctttcacttcccagagcttttcagacgatagctctcccaccagcacccaggtaagatgctatctcccaccctgcccttccggtcaactccatagtgtccaaggttaatttgaaaaagaaagaaagcaaaaaccaaacaggtttgtttgtgtttttaaaataagcatcaagaaatgttagggggtcacatgaccaagaaggaattctgaccacatcaaacaagagagaagcagcctgtttgctggacttgtttttcaaaataccagtcattaaaaaaaaaaaaaaaaaaatccgtagcctgccctcagactgaatctcttgggtaatgtagttcctttggagaaagtcaaccaagtgacagtaatttctctgacatttcagcatttggttaatggtataagagaagtgtggaggccaatgataaaaataatttaaatgtgtgtgactttaggatttgtaaagtgctttcactgattgtccttaatagataatgacacaagtagggcaggcattattactatcagtccctgtattacagattaagaaactgatcttcagaagagttgagactatttctatgtcacttgactcataagtgaaaaagccagagttaaaatccagttttgctggagcttaaatcttattcacttactaagtttgggcaaccttgatcaagttacttcccattctaaaatgcaactattatttttaattttttttttttttttgagacagggtcttactctatcgccaaggctggagtgcagtggcatgatcacagctcactgcagcttcgaactcctggaattaagcgatcttgtcacctcaacctctggagtagctgggacaacaggcatgcaccaccgtgcccagctaatttttttattttttgtagggacagggccttgctgtgttacccaagctggtcttgaactcctgggctcaagcaattatctttcctcacctcccaaaatagtggaattacacgtgtgagccactgtgcccggctacaaccattactttctatttggctcctggactgatggaagctagggcactgccaagggtatcagtggtgatccttacatgataatttggagagcctgaattacattaatgctgtcatttatggtctcttcactatgctaggttctttatatacctataatctataaggttggtattattatccctatttcatagagaaggatactgaaatttagagaagttaagaagtgtgcccaagtggtagaattggggttgaaagcaggctatctaccgccacagcctgagcttttcaccattaggacatactgcttgatactgtgaaagtatccagtatgtgctttgctttgttctctctcttttttttttttttaaaggttcgacatgcacagactacaaccctaaacctggccagttttttgtcaatgcgtgacatttgggcatgggggcgggtaggggcagacagtacaacagagagttcaaatggattggctttatttccaaaaccagtccttggggaaagatttcaaggcacgtcctactgaaagtcagcatgcagagattgtcattcctagaacagggctgacccaaagaacaacagtgctacaagcaatcttcacaccaaccctatgacgtaggcatcattatcccccattttacagatgaagaaactgaggttaagcaatttgtccacactactgctggtgaatgaccgagccaagacttgcacatactggttcccttccctgcattcctttttaaccatactccactcttgccttgggggaccaagatccgtgatggacatgttattatattaacaagaaaacagactcttgaatttggacctctgatgatagtgacacagcacatgcactagggtgttggagacaagagaaaagccaggccctgcaaacaagcttccaggtgtttgctaacgttgaggtgtgcagtcttggtcaatcatcaatccagtaacacactgcccagttaaagcactgctgagcagaacaggaagcaaaaagcgtgtccacaggctgcatttagagcggccctggcctgggtgaggcagcttgcctcttagaaggaggagaggcagagctcagtaggaaaccccaaggaccttcaagcagtaagagctgagacctggaaggttcttccacactgagaagtcaagacctcttccgtaaggcacccttctccatggaagcctgggtaatccttaaccctaacttgtttgggacactcttgagaagtcagaaagacttgtctgtgcctctcacaggtaactgacacaagtggttcttcacatggagaagaatctttcttaagggataggtgggagtaggagaagagggctgcaaaatgcctcccccaggaatgccctttcatttttgtttgcagagaccacgaccagggcaagcagctcaggtcctctgaaaccagaattggccgggtcagtgctcccctcagaaaccacacttgtttttcctccagggagccagggactcgatcacctgtgactcaccgtttctgtgttgcctacacagcacacacgtcaagatctaaaatggcctctgcaccctgttgccctcacccatcctggcccccactctgggaatgtgtgcagctccaccttcagcatgaaagtcgggaatctgcggctcctccctcccctgaaaaacagagcatgacccaaagaatagagctttccattctctacccttgccagtgtcgtaatgctcctgttctcccataagccactctctcctgcacttgtgttgctacaggatcagaacctaatcctaattagaacctagttttatttattttattgttattattaattattattttttgagacacccgagtctcactctgttgcccaggctggagtgcagtggtgtgagctcactgcaacctctgcctcccaggctcaagtgagctccccacctcagcctcccgagtagctgggattacaggtgcatgccaccattcctggctaatttttgtattttttttttaatagagatggtgtttcgccctgttgtccaggctggtctcaaactttctggcctcaagtgatccacctgcctcagtctccccaagtgctggaattacaggtatgagccactgcacctggcctagaatctagtttgatgtagaaaattcaaattcaaattgtgcattcttcaccaagtgtgctaaacttgcatctgggtgtggggctgtggttacggatatagaaaacttcatttaatgagaatgatattgacatttacacgacaacaacaacaatactgcaatttattgactattttctatggcaaacactgcagagtatttctcaaatgttatcacgctcatgcccccaccaagtctattgttaccgcccccattttatagatgaggaagagatcataagtagtcgagtaacctgctcaggctacacagctattaagagctggagctgggatttgaacctgggcaattgtaacttcaaagttggtgtttctccctccctaagcatcgccccaccccatctaccatttgtgctgtgatcttcgctgtcatggtgtcccatgtctttcactgttccagttcaagaagcttctccccatcgcctcctatccactacatcctgacttgctaatgactcttcttgtcagtaccaaggggatggtaaggaggaagagggggcttgtgtcaaagtgaggtgctctctaagttaaaaaattggctttggaggccttggggggagggatgaatgaacattttatcaacacaaatgtcattggcaagccccaaaacaaacagtgtcccaccgggcttgctcctttatgaggcattcaatcaataaaaagagagcagaactctgtcagatttattggctgggttcaaaccgaacacctcttctacccgccaaaggctgggtcaccagcactacctctcctttccgactctggacagccctcattttcccctatggggctacaatggttcattgtttgaggcaggccttgtgagaagttgtgtttgttttgcctcttatcttatcagctccagagcgacaatggcccaggtgtactcaccattttaccatcaggtgagaggagattgtggcctgggtccaggctggctggggagacttgctgtaaaaccgactggctggtcaccatggcgctgttgccatggtgactgattgttgaggaggaagtgatctcattgtttccctgctggctgtagcgcactcctgcaaaacaacacaaacccagtagggaacattagtgccaccagggtcctggaacaatgactcggcacctcttgttttcaagggtgggtaataagaaaataaagttgctttctcctcccctgtccacccacaagaaatatcggctgcttttctccagggtaaatatggcatgttctctatttaattctagaatgtaagcgccacgagggcaggaaatttttatctcgtttgttttgttcactgatgtatccccagtgccttggcactgaatagccactcggtaaacttctgatgaataaatgaatgactggatggattctgtttgttattgcttccgcacagttctttgaggatttgggggttgagactagccttctgttactggctggagtattttttattctttaaaatgccttttagaaatgtttccctggcatccctcgtggtgctgcaaagtataagtagacccatgtgacgaagaagaagcccttgtccagtgacccttgaaagagccgtagcttaggcatcagtctctgtgtaccacctttgtggccaggcccaagaggtcaggggcacggacacaggcagagcaggacagggatgaagctgcgtctaggagctaggctgtagaactcacattcctttgctgggggtcccatttggctgccttccagggcacagggaaaggtgtgtctgctgggaggtggggcaggcagcaccacacacaggcagatgtggatgtttagtaaaccactggagtttgctctgcaggggaagggtagaaccaaacatgtttacaacctcgctgctctgaccctccctcttgctcgggaaccaaaatggaggtctgctctcaggaaagaaaagttctggacagagatcaggcaactgaaggaagctaaaagaacgcctgggtccagtttgcagatggaaatcctgcttgatgtgcccatgaaacagtcaaggacaaggttgggggtacatggggcatctcacccctaagctcagtgcttagaaagacagtgttcttgttttttgctttggatttgacaaaaaggtttggaggaccctgtcctgcagagaccaaatgctctaggcatggaattatctggataggtggaccaactctttagctgcacgtcttcctttgcccagtttcccaagatgaaccatccctgtacactgattctgttgttgctctttcatccacccaccccctgccctagctagagccccaccttccagaggagaccacaaagttcccccaggggccaggcactgccataatcagtgtcataatctgcctctaattcaccaagatgaagcttaccaagatgagactagatgagccccaagccagttttccttggatcttcctaaggactttacccaaggccgatatgacctagagcttaagagggctggggaaaagaacaaaacaaatgctaaagctgggttctaaccttcaagagcaacttgtctgagtatgtagtggcttgacgcttgctctatgagcttttctattggccattttccccattctttgaatcaaggagctgctagtgggggtggtggtgacagtgggatggcgctggcattggtgtattggtttaaggcactacattttttgggaaggacagaaatcatgaagttaaaaggaggaacagcgttcagctccccaagtcaacagccggtgcccaggcccctgtcctcctgtgcacctatctgcagcccccacgtctcctgtttgccatcgatgccatcccattggattaaatgaggccttctttcttcacgtctgccacccagttcccagtaggatgcttccaacagttcaaagtgttgttacatgaaagaagaaagagatttgaaccttatgagctctgaaggcagagctaggttcaatggaaaacagggaggcagatttcaaataaataacaggaagaattttctatcaaggaggggcagtgggaagactatggactctgcagcgaaaccaactcaggttcaaattctgatgctgctcttaatagatctgtgatcatgggaaaattactttccctctctgtgcctttgtttcctctagaaaaatggagagaatgcctcctcaacaggactctttttggattagaggtaacatctatacagtttcttgcaaaatgccatataaatggcaactatgggtggggatgctgtggggaggaagctggtacaggaatggaccccaagatatttgccctaagatcctagaattctagatggcttaggacagattctaaacactgaatggaattatctttccgtagagaacagtttccaaagaatcctaccctggcagaaccactgatgctttgccctggaagcaacctgggagagaggtctagccgctgccctcttgctctgttcttttggaggaactggacttcaccctgtttttctcctgctttctctgactccctaaccagctatttacctccccgagaggctctgctcctgagagagtgttgataacgctgggagtcagttgtgttttcacctcccagcctgtccccatcatcgattcagtctcaagtcaaacagtctctggatttagcctatttaatttggctgatggaaaagggccagccctctgatgatcaaatatgggtcacaaggaggcttctcccctaccaaaggctacgcaattatttatttaaaaataattaaccaaggatttccgcaggaaacaaaaggcttctttacaagggagcatgtcaggagagactcaagagccatttgttagaatccaggcagcatattccaaggctgctgtggtttttatactttgttttctccccaacaaaactttattatataagaaatataacggtggagctgctctgtcaaaagacagatgagcctagacctttgaacgttcctttaaaagcccctggttaagtgatagaggctcggctggaaactgggggatccctgttttaatctcagctctgctatcaatttcttgggtgagcaccagcttcctcatctataagccagaggacggcccactgtggggagggggccattgtcacagcagtgtgatgggagccaggcacaaggctgctcatcagccccagatccacctgcaggtgttcccacgatgctcctctcaccaagcatgtggcaatcactggcccctgagagggtggctgtaatcagccagccatcttatgagggggcggggtgggggcgcatcacaaggtgtacaccaaaaataggtgctcttgttagaggaaggagaggccagtcctcctatatttcaaaaactcagaagagcacttgaagtgagaacaaaaataagtgcaaagtgtgtaggctctggagccaggtgacctgggtttaaatcttggctctaccctgtaagacctgtgtgatcttgggaagttacttaacctccctgagcttcagttccttactgttaacaatatccatctgtcaggtcattgggaagagaacggaatgagttaatggatgtccaaatacccagatcatgctgggcacataacagttgctgaaaacacgtcaattcctcctactttggcactgtccttgtttaaaagacatttttaggaaggctgaggtcgtgccactttattgagcacctaccatgtgccaggcactgtgttaggaagcattaagaaatggaatagcatcttcccttcttccttcaccaatgcaagttcttaaagtgaacatatgacaagggctctggtttaatattgattaaccaaagatgccaggttaatagccacagaggacccataggagaaatgacagtggcagatggtagccattcaccttctacttacttcctagctcaagccactcactggccccatccccattgttggctctatgaaccacagcaattgtgtccagcagcaaaagccatccaaggtggagttgagacatccctgaggccctggtgagtagatcatctactttcctctattcctaggcatcagcatcatgggtgttgggctattcctggatacagacgcagatcattcggtttctatccaatatgactggtcagaagtgccaaaggcatggcacaggtgcatggttccaagaagccagcatccttgctctgccttcctgtgccagcaccgtctctagggtcctttcacactgctgcagcctgggatatctttctaaaacaaagtcacaccatgcctctgctctgcttggaaacatctgatggctcctcactgctttccagaaaagccccaacacctgagactggcagaactgggcctttgtgattcatctgttttatttgcattatctctcaccacaatcttaatgcacttctcaaatggcctgaccatctcctgcctctgcacctttgctgtttcctctgcctggaaagcatctcgtgtcacatgtcgcccccctgtgaagctcttcttgattcatcctgggagatggctgctccttcctttgtattttacatgcactagacagagacttacggcaggagtcagtcaccctgcatgcacgctgatgatatgtttacttttctctgcctcttaaagaaagagatgagtctttacttgttgcatccttatagcctagcagactgcctggtactgtgcatatttattgactgaaggaatgaaaccccagcagctttgagcacccatgccccagacaaggagcatcacgtctagcagaagtagaaaatacagtcagttgtgtatttattgtagtgaaagtgtaaatctgttccaattatatagacatattggggataatttgagtgtaatgtcaatttcacatttggaaaacacttagtgaattcagaagcctgcatccagctgaatggaaccacataggagaatactaacaatgctcctgtgtgtacatatgcgcacctcaaacatccaccagccgcctcggtccactgtgtgcactggtaagacacatccatgcaatatggagtcacatcttttccttcccatgtcagataaccctttctccactgcttcacagtaactcacaacccgcagcacttctgatgcccacttccctaggcaaacttgccatatttactattgtatagcattgatatatttcttaactatttaacgggtataaaactctggtaatctttttattggattcttatcttttaaaaatgtgttggccgggcacggtggctcatgcctgtaatcccagcactttgggaggccgaggcaggtggatcacttgaggtcaggagttcgagactagcctggccaacatggtgaaaccctgtctctactaaacatacaaaaattagctgggtatggtggtacgcgcattagctaggcatagtggtgtaatccccactactcaggaagctaaggcaggagaattgcttgaacctgggaggcagaggttgcagtgagctgagatcgtgccactgcactccagcctgggtgaccagaacaagactccatctcaaaacaaacaaaatgtgtcgctgaggaagttttcaagtgttgtgctttttaaaaaagtttatttcagagacagagtctcattctgtcacctagtctggagtacagtggcgtaatctcggctcacggcaaccttcgcctcccgggctcaagtgattctcctgcctcagcctcctgagtagctggaactacaggcgcccaccaccacgctcagctaaatttttgtatttttggtagagacagagtttcaccgtgttggccaggctggtctcaaactcctgacctcaagtgatccgcccgcctcagcctcccaaagtgctgggattgaaggcatgagccactgcgcccggcctcaagtgttgtgtttttaatcctgtttttcccgtaagccctgtggttcttatcacatggcttagcaaactctggtgatttttaggctgcatatgtcaggttatatagaccctactgcgcctgtgtgttcaaagacaaacatgactgccttgcaggaggaccccagagaggagctgctcagggtgccattcaccagagactttgcagaaacctgtgcttcagggccttagagctacagctcatagagcccctggcgatttaattcagctctaagagcttcaaaaaatcatggaattccatgattccagagatcaactgggcaccagcctctagacactttaacaatctctctctctctctctctctctctctctctctctctctctctctgccataactctctgatgattctgggtcagttaacttttgagccttggcatttttgtctgtgaaaggggcacacagatattccttcttcacaagccagaataatgaatgaataaaataatgtcagagatgcactggttctgctgggtaaacagaagagcaatgtcaacaaagaaaacaggaccagaattgttcttttagtaagaagaaatgaggaaagtggggattcctgggcaatgtggggctcagcttgcccacgatgtggcttttggcactgaaacctgggggttcctttcactgaagtctatgagctgcacccagaatctggtgggatgcctttcacccttgacatttcagagccaacctcccatccctgataatgcaggaatgttcctctggctggtggacctctgccagcgtaagtgagcgtcccagccaccaacagagtaaacattactcaactggctggggctctgtcacacacattcttcccctgtgtttctaacctcatgcagagtgcagcccagccctgttgggtctagaaactgggaatttaaactcaggcaggagagagcatgcgaaggagaaagctcttccaaaaggtaataactatgttcattgttcataaattatgagtagacacagccatcttttctatgaagccaaatcattatgttggggagatgacagggagagactgggccaggcttgatggacccagtactgtgtcctgataactctaccttctccctaaacactttacttttcttaaggacagaggcagagagacaaatgattctgtctggtgaacttctgagaggcccatttggaagaaaagaatgtgaacaattccctggcttgaaattgagaactccagaaatgaaagctttcgaatgagttagcattgctgcctcagtttccttgtttgtagcactggacttttgctagttcttattaatatttcctcctctgagaggatacagattcatgtttgcaaagagtttagaagattaaaaatctgcaaatgtggaagaaaaagctgatgcaagatgaaagcaatttaaatgctgggctggtttcaattccggatccctttctacctaacatggcttagttaggagctcaattcataagaggagaaatacagacaggcctgcagggacagtaaacattcttgactcaaggagtaaaagttgagtgatacttaagggaagcccacaaactggttttcttatttaaaaaaaaaatcaaagcaaatgtaaccaagaaaagaaaaaaaaatctttcatcaaaagcaccttggctgagaacagaagctaacatgcatggtgcacttgaaaaaattgcacatgtggggaggtagaagaccaacagaaactctgtgtgtcctcccccacaaggtctacctgggccaccacgcctcatccttactagagtggcagtttctgcaggcaaacatcaggcagtttgcaatgaatacttcagcctgaagattgctgctgtaggtaaaaggaaccagcctggcacttgataacttgggcagtcctcacatctgagagtatgttacacccatctgcttctcaatgtgtcacaagcacccatttgacagagtggaaaactgaggttcagagaggacaaggttgtttgcaccgctccttgctagggggtctcccagcaagtccgtggtattccaaagctgacccttctccctcttcctcctaagccccaaatgggctccagatatgtagagcctccccatcacgacccactaatagcttgaaatgatcttgcaggtttgtttacttgttccttggctgcatccctcactgtaatgtaagccccatgagggcaggaccttgtctgtattctccattttcttcttggcagagtcatgctaagcattcagtaaacatttattgaaggagtaaatgatgaatgaataacctatgcttaaactctgactgatgactccacatcactttcacctttagactgttgagttgagtggtggtgaagtgactggagtatgtccatttatcctctaaatctcccagtttttcttttcttttttgaggcaagctctagctctgtcacccaggctggactgtggtggtgcaatcacagctcactgcagccttgaactcctgggctcaaggaatcctcccacctcagcccccaaaaatagttgagactacaggcacatgccaccatgcctggctaatttattaatattattattattattattgttattattattttgaagagatgggggggtctatgttgcccagggtagtctcaaactcctgggctcaagtagtccttctgctttggcctcccctccctgtttttccatgggcaaggagaggcaagcattctttttaaggaggaagaaagaggagtaagagaagaggagagagagattaaaatacaatcaaaattgaagaaacagtattgatagacttgggcagtttcacatttgaagaaccgagtttgggggctactgggttgatttggggataaggagaagagtcaattaatgggaatttactgtggcaacatgaataacttttaaatgcccctttctccaaagaaactagagtaaaactaagaagggttaatggtggacatcgttaggcctaaaggctgtggggacacagagtgcccttctgcagtctggctcccagggtctggtattttctgagcagctgcctttgcaggcagagataatatggctgcaacaaaggcctctaggcctagtggacaaggagaatggtgatgctcccagtgggtctgggcaaagggagaaaggctataaagccatcagcagactgagccactgggtgtccacacaaaagtaaggtcctataaacagacatctgtattgtgactgaagggctaataaaattgccttagaaaagagaggttttccaccacagcctattcataacaaagaccgtactgggagatgatacccagggagaagatcctttgaggtctggcaagtgtcagagctgccttgtgatagggatttgcctggccagatcccagcctcttcatcactgtcacagagggcatctccatcagtatcattatcaccatcatcatcaccatcatcatgacagatagctgccgatcaccggcaggcccaaggaggctcgtcccaagcaacaccaggtgttgggcactgagataggagcaccagccaagtgctcagggagcaccaccagagacctaatggctgcccagagcagggcagttttgtttctgtctgtccagataattgatttgcagtagtccagtcccttttctagacctcattttgctcaaaggaaacaaaagaggagacgttcttgctcttttcttgccctagggatcctggtaagagattttaaaatgaatgaaagtagtagaacattaaagtaactagtagaactaaattaaatgagtagactagtttactagtagaacattagggagaaactcatgatacgttctttgaaaactttctggtaacattaaatgtcgacattaatttgtgaactgtatacttaagcagtgttaatagggttgaagctgggtgacactgtttctagagaagagaaaatatgcctttatatatacatatatatataattatatagcacatatatgctatataaaacaaaactaatcctaggctcagtttaattcttaaactgaataccaaatttataaaacagggggtttctgcatatgctttgacaggaagccttctataatagatatctttatttcacaaatatatggagtgtctaccatgtgccaggcacagggctatgggctggagacacaatgatgaagaaagctacctcaggctcagatgttggtacagcccacaattctgccactcagaatacatacatacagagcaaggtgttcagagacttcagggaccttcttcttcacggtgagattgaagtttacaggtagggatgcaaaccctctagttcccctggctgtagggttgtagacaatgaagaagaacggccgctcatttctgtctccatccataaaacaccttgagataaattaagcacttttgtgcccatcgtgcaaactgatgttacacaaataggagatgttgtttaagggttttccactcttgctgaacaagaactcacatagacttcactgccaacccagtccaatgggtgccaagcaggaagaggcaccctgcagtggacagggccagaaggcatgggcatgccagctgctattcagaagccctcaaagtgttaacctctagcagttataggtgtctcgtttatacccattataaatctgtttattgtgactggccccacccaatctgctggtgtcgtaaagctctaatgatccctaataaaggtggaaggcttctaacagcacacagttcctgaaacggggaaggagcgagggagtgagggagagaaggagagagagacaatgatgagtttcacaataaaataccacaatggcaagcctccctctgcactccaagctgcggagtcctgggccccaagactggatgccacacacagtcttcaaataatagcctgtcagagtggaaaggccctcatcccacaccctcatttgccagaattcccaggaagttaaatgattcacccaaggtcacccttgctcattggtggctctgatctcctgaatcctagtccaaggcccctcaccccggctgcttctcttttcccatttcagcaaggggccatgaggattaccttcaaccccttcagaactctcctgctccatctggcctagtaatgtcaaccctgactatgcatccaaatctctctctcttttttttttttttttagagacagggtctcactctgtcacccgggctgtactgcagtggcgccaatgggcacaaagtgcttaatttatctcaaggtgttttatagaaggagacaaaaataagcagcctgtgttccttgttgtctacaacccaactgccatagctcacttcagcctcaaactcctgggttcaagtgaccctgctaccttagcctcacaagtagctgggactctacgtgaatctcttagggcttttgtcgaaagttcttatgcctgtgaacccctcatctctcaattctgactccaaaggtgtgcgtgggtggagggagccatgtctatttttaatgagctccctggatgatttttatgtggtctggagagagatttgagaaccacagatcttgccaatacttagttcattgtttctgatgtttcaaatgacaagcagggttcatggaaagggaaatccttcccgattgaaactacaaggtaagacccttgtcaagaacccagggagaacccaagctcttccgttctctcaacaccctgaagtttctgagtcaattcaataatactgtaatggcagctaaccttccttgccaggcactgtgcttggcactgggtgtgtctgatcatatttaagcctcattgcacccctaaggggataggtattgggacagagaagctaataacttaaggtcacactgccggatagtgacagaaccacaacccaagccaagcctgatttgggtgctatactgggctacccagacacacgcatctgaatccggtcctgagaagggactggccataaccagctcaccttggctcaggtaggcttcccttgggaaagtctacatgctaaagaccatctgcaaggtgtttctccaacttaggaagaacatgcagagtacaagtcctgagaaaactgactcttgacttcccaaaagcattggaagcatcgagtccccccttgccagttgattcctcagtggctgaactcacgcaagtgtgctattgcggaggctgctgaagttggagcatagggtaacaggaaggtacctgaagcagacgcatgctcacaggttgagggaagtggtttccagaaaatcagcccttaggagctctgaggtttccctttgctcaccgtggggctgtgtgcaccttctccttcttaaatgctccttcgcctgacgtttgggggccattaagcttcccagatgcagcctccaccaggaacatcccacacccctctacctggcaggttcccagggctaattactaacaagcaatacacatgagaggagtactcacacctcctttaattaaaaaagaaaaatggccgggcgcggtggctcacggctgtaatcccagcactttgggaggccgaggcgggcagatcacgaggtcaggagatggagaccatcctggctaacacggtgaaaccccgtctctactaaaaaaaaaaaaatacaaaaaattagccgggcgtggtggtggacgcctgtagtcccagctactcgggaggctgaggccggagaatggcgtgaacccgggaggcggagcttgcagtgagccgagatcgcgccactgcactccagcctgggagatagcgagactctgtctcaaaaaaaaaaattaaaagaaaaagaaaaaagaaaaatgccctgttagttacaggaaattcatggtcatctcgacttcatgaacatcatgaacctgacctcctgctacatggtcatgaccctcccctctgcccccaccaatccatggtcttcccagcttcccctcactgtttcctgaatttgtactaaatgccttacggcactcaatatgccttgtggatgtcacagagaagtcctaggaagagcaggagattgcctcatacccaatgtgctgcaacaagccagcctaagtttgctgcaaacaccaagatgaatatctagttggagatactcaaattctttaaaaatcaaggttgaatgaaacctccaagaaggacaaggaaagagggaaaaaactaaaaaaacaaaaaaacaaagaaacaacccccaagtctctgcaaggaatggtaacagctactatttatgagaatctggtatgtctggagtgttttacatatatattatcttatttaattcttccagcatctgcatgagtggatgtctccacacctcaagaggcaagcacagagattccagagacttgcccaaggtcacacagcagtaagtgccaaagtgaaggttggaatttgggtctgcctccatagcctgtaattttgtcactgtgctggctggatttaaaagagcatttccccatattagatgtcaaggctggtgatggtgaggcaaattacacaggttgggaggcaaaggggagttagttgctaatccaactccagtactcaaaagtgtgtcccagaccatcctcttcaacagcacctgggaacttgttgaaaatgcagaaacccaggcctcaccccaggcctatagaatgagaatctgtatcctaacaccccccaccccagggaactggcatgcactttaacatttgagaagctaaatttgagaaccttagaactggttctcaaatttagctacacattggtatcacttagaaagttttaactactgatatgtagtcccactccccagctgttctgacaggtccagggtgcagcttggatactgggatttttaaatactccctcgggtgattctaaagtgtggccacatttgagaactattgtcctacagcggggtcagcaaactggtctgttggccaaagcagcctgtttttgtatgacccacaagctaagaatgggttttacatttttaaacagttgagaaaaaatcaattaaagactataggatgatatgtgaaaattatatgaaatttaaatttcagtccccataaaataaagtttgactggaagacagtgatgttcattcacttccatgtctatggtctatggctgctttggtgctacaaaggcacagttgagtaattacaactgaatagtttaaagtacttaatagttactatctggctctttacagaaaaagtttgtcaatccctgttctagagaatttatgaatagctaggataataaccatgactgactaattgatctgactttatttgtgggctgcattccttttatatatataacttctatatgtatgcgtgtgtgtgtgtgtgtgtgtgtgtgtgtgtgtgtatatatatataatacatatatatgtatgtatatttctctctctcctcttcatttgtgtttatacttccccctaaaaaataggtagaggcataaagccagatcttgttccattccattaagcaggtagcttcaaaggcccttgcacagatctctgcctctctctgcacctgtaatacctaattctctccaagttcctgtcgcttctcatcaaaccttcaacagtttccaagagcacttctcccataagctgcaggccagggctgtgtgcttgcaggcagcttccttcctcctcagagctcactggaggcggcaaggagtccttgaatcgtctaaggatccttcaggcggattaggcatgaccctttggtgataggactccagtatctcctggcccctttgtgcagaggcttggagccccacgagcacagcagcctggtttctttgtatgcagaccagggctggtcccctatcagagggaggctgacagcagaacaccctgaaggctaggcctcttaatctcattaatatcctgattgtcttccccaacccagtggcagctgatggggtggtacccacaagataaaatgaccttcaaattcaagagataaaatggcactcagataaagtccctaagaaggagaatgctggagccacccatgtccgccactaaacctcaagtcagtatgaatgtgtttcctagaatagcagacatttcaaggcaggatttgtctctcttctgaactgaaataatctgctacttaaggacaatgggccttatttaccgtgaggaactttgctgctgagatgaatatttttacaactaccctcataaacccctcccgctgtctgctgcccagggagggggcggagctcccagaggtgagctgaggtgcttgcactgtctcagaagccccattaagttgttaaggcatttagtagtccagacagtgccgactgcaagggcagttcaaatccccacacaaatggggatggggtcatgaaagagggggctttgatttcttgcctgggcagggcacagaatccaccttggtcaggggcagtggttggggaggaagtagtaaactacccagaatgggagactctcacccttaccccacctctttggccatgatctcccaaagcctcagtgtcatttagaggggaacagtaggaatgtgggaaaaggaactgctgggggctgtgtgtgtgtgtgtgtgtgtctttctctctctctctctctgtgttgggtttagtgcctgaaaagttcttagcatctgcataaagcaaaaagagatggacagtgtgcaacagctcaaaacctctccccaccacttactaagaatatgaacttgggcacatgccttccattctaaatagttcacttctcttgattgtaaaatgaagatgacactagagatggctcctactctgcagggctgttgtgtgggtcacataagatgatgcatggaggaactcggcccagggcctgggaccaaggaagtgctccatcaacactggccattagaattcctctcgttgagtcactaccttgccactggacactttggagatttcctcgtgtcctgcagaattcagtgccagggaaaacaacagcattcacataggtaccctggcccagagtttggctggtctgagacccagggttagattccctcaggtaacctgggaggggctgtgaagggggatgagcgagaggcaggaggcaggattctctgtttttcaagctctaagccacatcagggaagtcaagtccactgggcttggagagggaggaatagagttcagcgaaagggaggagcagcagccacagaaataaatgtctcctctttggtgaaggggctatggttcgggacccctgaaagtcctcctggcagggcctcttctctttttctttgtgcctcactttctttccaggagaataagtccccccttccctctcaaaggtgacacaagagtgaggacatcatgcgtgggagagcggaggctgatgaagaccttttacccctcctctcctcctcaaggtagtggccaggtgagcttgctgccgactagagcaaagggtacagggagcaaggtcgccacagatcacacagcagataccacagcttgggccaaggctagccaagtttccatcccgcgccaacttcctcctcctcctcctcgagccaatcaatacaagcaccaggctccaaccagtccttctccttgctgccgccctgccctctgaccttttaggggcctttctcttgattcatctccagaagggaggtagaggccatcactccagacctgctcaatggcttcagaatgggctgtcatggagcctataaccagggacagctcctgctggccaagagctggaatagggggtgggggcggataaaggccttccaggctgaagataaatggctgcctgcagcctgctacagtaacttcaggcccccaagaagagcaaacaaagggtgcccctgtgacactccctggaaagatgaaggcccagcagcggcagccaggctggttcaaagccccaacttaattgtcaattaagcatgcataagggagacaaagccatgacaacccttggctgcatgctggtgtgtgattgtaaagccaaggaggggcaacgctggaaacagctgactctgctgacagtgtgtttgtagggcatcttgtaaccaatcagccgctgacagaggcagagtgctcctcctgccacccctattgtgccggacattccaggactagggtcacaccgtggtcatcgtgggcaagtgggccacagcatggtaagcatggctgggagggaaggtgctgttagagaaaggctgctcttcctctctaggaagagggttctggggaagcttcgtctccaaggtgctgccagccctcctggctcaggtgctgatgtttggagaggggagagcgtggagagtgggtgtggagggattcgggccttgttccccccagctcagtctttggggttgctagtgctgacggtggattttgggctctcctcagcaacatggagttttttttgttgttttttttttaagacagagtcttgctctgttgctcaggttggagtggagtggagtggcccatctcggctcactgcaacctccacttcccgcctcccgggttcaagcgattctcctgcctcagcctccggagtcgctgggattacaggcacctgccaccacgcccagctgatttttgtgtttttagtagagatggggtttcaccatgttggtcaggctggtctcaaactcctgacctcaagtgatctgcctgccttggccttccaaagttctgggatttcaggtgtgagccaccacacctagcccacagagcgttttttttttttttgagacggagtctcgctctgtcacccaggctagagtgcagtggcgtgatctctgctccctgcaagctccgcctcctgggttcacgccattctcctgcctcagcctcccaagtagctgggactacaggcacccgccaccacacccggctaattttttgtatttttagtacagacggggtttcactgtgttagccaggatggcctcgatctcctgacttcgtgatccgcccgcctcggcctcccaaagtgctgggattacaggcgtgagccaccgcacccggcctttttttttttttttttttcggtattctgcacacagttacgtttctggcttggttagtgaccctaccttggctgtgggcactgaggtgggaagagtgccatgcggctctacagacagaagccacccctgaatgctgggctccagcctgctgtctgcctgagtgcatgactcgggagccctgtcacggcacacacgccatcctggcagcctgaggtggggacacaagtctttgaccccagcatcgtgcatctcaggcactagcacagcagccacctctgtttctagttccagggccaggctacatctcactgcctcttagggggaatgccctggtgtgtgagatcaaaaagaaaatgatttctgctgcctgccagtcttctcactgcccttgtttagccctctctaatgttaagagtcataatgagggtagtatgggttatcgggaaaggtgtctttatacattcactcctttcatcctcacatgcaccctgtgtggaaggtcctatttctccattttgtaggcaggaaattcagactcagagaagttatgtgaattagccacagttataaccttactggttagaacccagatacataactacactcagagaaagagaagccagtccctgggcttgggacaaggaccatgttgaggagcccagagtgaaaattaaagcagaagggctgggcacaatctcacaactgtaatcccagcactttgggaggctaagacaggaggactgcttgagaccaggagttcgaggctgtagtgagccaagactgcaccactgcactctagctcgggtgacagaggtagaccctgtctctcaaaaaaaaaaaaaaaaaaaaaagacagaagaaaggcagccactgataatattcagtgtcccataactgttgctccagaaacagtaataggatctattacaccgcagaaagatccacaaagcccccaaacaaaacctccatctgcagctggttctggggactcgacagtgacccgatatccttcctaccagacagtaacctcccagagggcaggacgcgcagctcgtacatcactagcatattcccaggacttggtaagcattcaacacatcgtagtgctgtgggaaagtatggagtgggaaccagcaggcctgagctctagtccttgttttgctaccattgctctgtgtcactttggcaaatcactgcctctttctgggcctcagttcctttcttcaaattccctccaaattctaacattacaagatttttagaaagatccagacttcaggggcaccccagagtatccacttcccatgggacacgcccttcctagactccagtcagaggagtacacaggctgtgttttctgccctgctccctgtccctccagccctagctctctgggtctcctgtcagcacacaggatgcctaaaccaacgaccccgtggtgacctcagcacagcccttgcttgtcagaaggctgctgggcctttgtttggcttccaggctccctgactttggtgtggagatcacaggtcccaacacaatggccattgtcttcccagtaatgccccttgccccaaccacgccccctgtagctcccagcttcagctccgtggatcgctgtggtgggcaagcacactggtactgctcagtgccagccatgtgccatttgccacaaccctcagaaccctgctttgaatttccctaaaggggcgaagttactctgcaatcaggccagtctttgcctaggggcttctctgcctcttaagtaaccaagactttcttcctgtgtggctgagcctctctcctctgtgggagtgggacctacagaaacccccagcactggccccaccttcatgctgggcactgtcaggctcccagaggccctggaagaggcagtgctatgggagggcacagcaggcatggaacaaatgcttgtacaccacccagctgatggctccgagcctgtcttggtggctttggtcccctcaacacttgggtcagcccccagccctcaggcctttctcatcagaagggcaaccgacaggtgaggggagccaacaggtttcagaatcacccctgagttagaaacagtgtttggctttcctttcgcaagcccttttcttggagcaggcaggaggctgctacactttgtcctcatgggcaccacacagaccccagtgagcacatccattctaggaagccagctttgccagaagaatgaaggaccagaagaagtgctccatcccagcctgtgcctaacacagcgctcagcatgaggtgtgctttcccccaaggaggctgtaggattccatcctgacaaacccaaagcccacagcagaggcattctaatccaggccagggcccagcacacaggagcactcaatcaagcatgatggagcaggtactcggtcagtttttcccaactcattgctgcaaagatttcaagtgactgacccccaccaaccctgatgacacacggaagccaacaagcagaggccaccaacagagtggccgtccccaaaggctactgagcttctcctgaggcagccggaccgagcgaggggcaggatatggccagagatggaggaggtggccggagtgccatcctccaacacagtgagggttgccacgccatcacgacccgtttgcctgcggtttggatctggcccacccataaggcagcctcctcagtgtagaatgaccgctgagtcagcagccacacagggagaagaagagggaaggagacaaatagggtaaagggctccctggaagccgagtgagccctcacagggcaatggctgaaccaggagttggaggaaactgatcagagccacacattatttccaggggagtatattctggcaatgagagagcggccctaggatcatctcaaaagcgtttgctcctctgaaaacccttaaaccagataagatccgtggcaagaaccaggatggttgggttgccgaggcagtgaggcccaacctttgcttacctgacagcttgtttggaggagaggagctgggctggtggtggggggagccgtgggagagcagagggttcaggctgtgagtctggttggagctataggcgtccatggccagcttttgccggaatgcctcctccttcctgcggtttgcaaaccagttgtagacacggacctcagtgaccaagttggagcccaggccgtgggctttggagggggacacccctcgctgcaaacattctgccctgggaatggatggaggggagatggtgagtgagggggggcggggggacttgttggtgcttggccaaaaacacacaatcacagcagtcttggttgggagtatgaaggggccgtgggcagaatggaaggctggggaggagaggcctatgcagagaaaaggccaatccatggagtgatctgatgaagatggctgaagtgggcctgaacgcagggacagagcaggctatgccgccctgggagtcaggggcttaggctctggtgtggctctcgaggagaagagagcaagccggggacaggcagtccaggggaaggtccagatggggcttccttatttagccattcttcccaccacataaaaggcaaagcccttcgctggctctgtcttgagtggcttcaaagcacttcgagaggatttctggtcttttggggcttgaactccctgaaagagtgccaggaagcaagatgctttatcccctccaaaaggcaggctgggtggggtacaaagcagggtgcattgagatggccagtctctagctttatcagggctggtgaaacctcaaaaccaggtgcgagagattcttagacactactgggtgctgcaaggcatctcattagtcggggtatggagcacagcctgaggactcagtggcaatacaggcctccctgcttcccagcctgacctccctggctgcattcttcccacagccaaggccagcccagcccagagacagagaaagcgcacacaggccttggccagaccaaagagctgaagttttagaaagtcaatactggagtcagggagaacagggcaggaatgaagtaaaaagatttcccaaggctttccaatcgtttaaaaaaaaatagctgggccctgtggctagagcctgtaatcccagctatttaggaggccaaggcaggaggatcgcttaagcccagttcaagatctgctgggcaacatagcaagaccacattttaaaaataaatacttaaaataacacagagttgtttttttgtttttttgttttttttttaaatagagatagggtttcaccatgttgcccaggctggtctcaaactcctgggctcaagcaatcctcccgcctcggcctcccaaagtgctgggattataagtgtgagccaccgtgcctggctggtagttaacaagtaaaaagaactctgttgagtcagcgggggcagagtggactgaacagatctgaccaattcttactctcctgccaagtttccttttggaccactgcatgtctgacaattggtagaggccagatctagagtctgtggctaagggaaagttttaccctggcctgcagggaggtcaaacacacaatttcgcttcccaagtatcatattttaaattagcattctccagagtatcttccctggaagaataattcatggggttgtttgtactctaccgaagattccatagttaacaaccaattcaacaaagctaagtgggtttcttgactgcagggcttctcggaacctttaatatatgttgtgactctctaaggggaagtatccatatgctgattctcagacttactgattaatgaattgatattggggttctgtggaacatactttgagaagctctgatttagccacacttatctgtataactagtgtctcaatatcccaggaccgaggggagggttcctgggtctgtgtacttgcccacctgcccaggtgagcttctggtggtgttacctgttgcattcctccactaaggcctctctctcttccttgctggggttcttttgccgatcgtaggcctggtacaagatttgctgggacgcgggcccccatttgaaccggttgcggcgcatcttcttgttggtgggctcagagcaggcatcatcggactgcccaggcccatggctctgttgactgaactctggaaagagaaacagcagctgatcctgactgcttttgtctgtcatatttccagaactctggactgtctggttgaattctgaaaagagaaaggagtagatttgatagggtctgtagccttcactcagcagacagacagacagacagacagacaacggacgaagacacctttattcccctcgtctaactaagctttgcaaccttctctcactgcatgtggagctggagatggggagccctcagcacaggcccttactgcccacctcagttgctccagcaaagccacccttttcctttctttgaaggagctcaaacatagccagctatagttttaagaaaattattattttttcccctttggctcactggccttcagagatgaagcaacactctgcatcctgaactcctgtatttgatgtcaagtgggtgagctcaatcaagtctcacatccaggggagaactgctcaaaggtacaatttacacttgcacaaaatattcagaggctgtagatagcactccccacctctcctccctcttcctatatcctaggtatctacattataaagtcaggtttttagaaaaaccccaaaccttttggaacatgctttgaaataaatataactggagctttgtattggaaaaagaaaatgtgctttagatctcaaaataatttcaaagactacaaacacaggacctgtctgggagtagtgtttaattagctggaaatgatgctccctgtctgtccaattccttgagtccaggcatactgtgaccatcaggagatttttgtggaatgaatgagaaccagcagctcggcccagaggtgatgccttagcccacatggtttaatgagatttgatatctacattaccgaagaagaaagctttgctgtcctcgtcttcacatctgcatgaagcagggctcatcaggagtgattaattccattttaaagatgaataaacatggaggctaagcactctgctgagcaaagacacgtaatacattcatctcctagctctgggtccctatgttctggatcttaatatcttttttttttttttttgagacagagtttgcctcttgttgcccaggctggagtacagtggtgtgatctcggctcactacaatctccgcctcccgggttcaaacaattctcctgcctcagcctcctgagtagctgggattataggtgtgcggcaccatgcccagctaattttttgtatttttagtagagatggggtttcatcatgttgggcaggctggtctcaaactcccgacctcaggtgatccacctgcctcagcctcccaaagtgcagggattacaggtgtgagccaccgtgcccgaccttgatgactttctttctcagttcctgtaattactcccacaggtcacagaaagtggaaggctaccacctccctttgtgatgtaaatgatgtgccatcatttacatgccatccttcctgttcctttggacaactggatccaaaatcctcaaggttcaagtcaggctactacttaacgtttgaatcccctctacaaccccacaccaagtggccctccaggctatatgcctccagcagcagggaacttaccacctgtcttaggctcatttccattttgctccatcgggaggaatggttagggcccctagcccgccaagacttgcaatcccaactgcaggtggtgttgggctttgtttaactgtggactgatggtgtcactggggcctttgatttcggcccattcaccttggaggattcttaggccaccttagggctctgttttcagtggtgcccaacaatgccactatagacctgagagagtccctgtcaaatgtactagcaggaagtcactgctagtgggatcatgtggggccccagcttaattccctcatcatttagtctccccagctgtggaatgagactgactgaaagcttagggacactaactagtcttttagaatatctacccctagtcaggatgatagtgatgttggcccaaattcctttgggggttatactttttctttttttcaaacaaggtcttgctctgtgacccaggctggaatgcagtagtacgatcatagctcactgcagccttgacctcctgggctcaagccatcctctcgccttagcctcccaagtagctgggactacggatgtgcaggccaccacatctgactaattaaaaaaaattatttttgtagagacggggtctcgctatgttgcccaagctggtctcagactcctggcctcaagcagtcttcccgccacctcagcctcccaaagcattggggttacaggcgtgagccaccatgccccacctgattatacttttcaaagtgctttagcccctctatggtatttgacttcacagcagctctctaaatgcagttacttgaggggaaatccaagggggagaaggagatgtcccctgctcagtgaggtctgtcacagtgtcttccctcctccccgtgggccctgtgtggcaccagtagagtcaccaatggcgaaagccagtgtggatcatcccaagggcctgggagcaatgtgagattttttcatttgatgtgaacagacacaataacggttcacatttattgaaccttttctgtggtgaggtattgtgccaaatcctctaaatatattccttcatctaattcttacgaccgctccatgtgagaagtacagccacctccattttacagatgaagaaactgaggttcagactggtgaagtgacttgtccaaagtcatgtggacttggggcaggagcctggacacgagcccagcctgcaggcttgcaggctcctaactaccagcctgtgcatcacctctcactaaaaacaaaacccaagccacgtaccccgcaaacgcttcatatctgacttgtgtggaggtgacaaaaccgattcctgaagctttgtgtctggtgggtgtgagacactctcgcagctgctccccagtgtgagggctgcctcagtctctcacctgccctttgaggaggtagcaggctgaacagtgttcagaactcagtgtgtcctcaaatcagccaggtgggtttgcctgtaggtgctcagaaccattcgggttccactgacatcaggggcttggctctagcctctcccaatttttgaagaactagactcccacatttgctccctctagccaccaacaactcttctctacttcccttcagattaattggggttggggaagaaaatgttcattgcccatgaaaattatcttggagaagttggcttcagtagcctctttataggcttgggggctgcttggacaaggaggttctgtgtgtgtagaggggcccatgaatattaccatttgttatttttagtttttccaggaaatttgtaatcatgtatcattttttattctctcccctcttcctccttctcctcaccccattcacttgtgtccctcttttatttctcttacttcctaattcttatatcatgcttgcatgtcttacattcatccttcaagacatgatttgaatgtcacctcttctaggaagcctcccatgatgtctccaggcaatttagcaattcctctgctgccccttgtgtatatctttataacagctcttagaaagtgaatgtcattatttactcaaacatctccacttcttcactggatggcaggtaagtccctggagaaaagaacctatgtattccatagcttagcgtagtgtttggcacatagtaggtgcctgtataatagttacagaaggaaggaatgtttcttaagcttttatgtctcgtgtgactttaaaacaaaaataacaactgggtgcggtggctcacccctgtaatcccagcactttgggaggctgaggcggcggatcacgaggtcaggagatcaagaccagcctggccaacatagtgaaaccccgtctctactaaaaataccaaaaaaaaaaaaaattagccaggtgtggtggcgggcacctgcagtcccagctacttgggaggctgaagcaggagaatggcgtgaacccgggaggcggagcttgcagtgagccaagatcgcgccactgcactccagtctgggtggcagagcgagaccccgtctcaaaaagttaaataaataaataaataaataaaacaaaaataacaataacaacaatctcttgaagaggctgttgtatttgtaaaacgtcccttcctcagcatcttgagaaactttctggacctctgtcttttgagaagtttccagtctgcctttcctgcctccttctcctttctgaagaaattctcattgaatacagagaggcagcacagactggaaatgctgcataaagcttaaattgggcagggcccaagcgttgttgggtctttggagacaatggctcctgagaatttttttaggctttccaggaactacagagagttgcttcatgtcaggaacacaaattcttaaagagctagtcaccaagtatggggggccaacccattcttggaaaggtctctcgctctaagcagcaaacagctctcatgttgcttcttccaatctattcatgtaatgctcccaacaaaagcacaaacaccacaatatgaaatgaacacctaaaaccattcctttcaccagcccagggacattgagacaataaatactgaaacaatcacttcagagcagtgtgtaacagaagacaagagtcattttaaaaagcaacagggaaaaaacccaacccagaaacccagatagtggtggaaattaacatcttgataaagacagagaagcctagataaagccagaggatagtgtgtggggagagtgaaaaccgatacaaattttccaggaaaaggattggatcaaagtaatgaaagtgtaatgtcaaagaatactttcctaaaatacagacagtatgtcattcctactcttgttattcataggcagttcaaacttctctagacgtacttcaaaacaaaaaccttttagaattattgggtgggagaaatcttgggacagaaaaaaaactttgggatgggaatggggatgacaagaattgatgggtcagagttccaaatgcagatgcttttcctgtgccctgccttagccagaaatagcttcttcatgagcagggccaccagctgaggtccccacactctaccagtgttggtaaatgtgggtaaacaccttaaattgcctcaggattcaatccctcccactatcctccaagaacagggtgaagttctgaatatatctctctatacaaatgcattctattgttgatactttttccagagaggaggaaattaacagtaatagtaatcaatattattgactgcaacgaaatgtcttctttggaaattgactgatggtcacgtatcaaggggagatgctgggttttctctcagggaagacatttcactctgtcacctacttggtttcaaagagaaggaggtggaaggaggggccaaaaagtttaaggtatgctgcatacactgacaggctcctcagagcaactggctgggtagcaagggggctgtgactgaagaacatgacagaagccaatccattgtacagcaaccaccaaggccaaatctacttgccaccttcctcatatctgccaagtgctcacaaggccttgtcgatgaaagggaaactgaggcagccaatggggtgagagggcaaaggtcacttcaggttgaggcagaggcaggatgaaaacacttacgtcggaggatctctcgttgctttctgacgtaccaggtgtacagagcggcacgcttctgggtcttcataggggtgcccttgttgagatgctgggagaggtgcgactggttcaggccggtgacatcgaccacctccctctgggggatgttgtgttgctgcatgtaacccttgatcattttagcagccctccaagggtcctcactagacagacaagcagatggttagggtactagtgggagacatctggggagaaacattctttttctagggggtgctacctatggtctatgcaaaattctgaattttccccccatctaagctacaactttggggtagacatgaggccaaaatggaagctaaacagaggagaaggtgactgcccctgtacggtacacctcatccctttcttctgaggttagtgggcaaaagaggacttcccatcttcaggaataaaaaagcaccaccaccactctctcttattaagcaaaaagaaaagctcttgttttatttaattaattaattaatttatttattattattttttttgatgtggagttttgctcttgtcacccaggctggagtgcaacggcatcttggctcactgcaacctccaccaggatcctgggttcaagcgattctcctgcctcagcctccagagtaactgggattatagatgcccagcaccacacccagctaaattttttatttttagtagagatggggtttcaccatgttggccaggctgggctcacactcctgaccttaggtgatccatctgcctcggcctcccaaagtgctgggattacagacgtgagccaccgcgcctggccattttattttgctttcctccattttcctgcaatgtgggagatttaaaaggcaggaggcccactggaaagtggggatgcctttagcttggggctggactccctgatcctacaatgaagtagggatagcatcagtttctgaatttgcccaattttagcttcaacctctcctacattattttccttttgaatgggtatctccatttcttataaaacaggggtgaaatgtatgtgttcaccttctaagaagcaaggaggatgtcttagccaaatagtaaataattttcagagttttagaaaagttttccaaaatacaatgttgtatctccttgggacgggaggatcacaccactgaggtgaggcaagtagttaaaaaaaaaaaaaatccacagctccaccttccagacaaaatctactgggctaatggggacaaataacttcaatttcggacattaacaattttagatgcttgttttcctgtattatgtttctcataaattttaaatactggataagaacatggttatacttttcatttctcataaacacaggtgtgtaaactgctagttttagcacctttgaattttatttgtctagaatggtttcaactttgccaatatcttttcttgcttattgaacagatgctttgaaaagagagatataatttaaaactagaaattaaaatagtgtgcagcacagaacaaaagtactaaagaagcaatatatacatgtttactatttatttaatgcaggtacatatttaacttacaaaaaccagcaccccattactgtatgttgatatatatattagcttgatagaacaagaaaaaaaacggaagggaaaactagtttcaggtgaaacaaaaaagaaaacggtgtagaggctgaaatagatacagcattgcaacataataagcaattttatttctaaatggcgcctttaaatatgtcaaataaaattaattctgtttaatgaataaaaatccagtaatcgaacatattttataagcatttgggtagttgtgattattttattaagactttgatattaaactcgtgagaacacaggctttgatagagatgtttttgagaaatgcaaactttttatattaattatatataagaacgaatttctcaagtatttacaaaggtaatttccaagtacacaatatgaggaagtaacaagaagaacaaaaaatgagaaaacgagttacagtttcaaacgtggagaattcacattaagaggaaaataatgtaataaacgttttagacatatccttgtaaacatcacagatcatttaaaagtttatttctggtcaatatttccaccgatatttttaggatggaaaaatactttcaacggctacgaacaagactcctcgaaccttaggggaaaaattgcattttaaaagtgaatattgctttagcaaattcttcggctatttttcttttgtttaaatgcctttacctgtgttcattttgtatgcctaagaaacctagaaaaatagggtactgttctaagtgggaatgattctgtggaaacagtgaattagcccaacaattggggagggtttaaaaaaagcccccaagaaccttataaataatggcaaaaccttttaagtccgacttaaaagagtgaggagtaagatggcgcagttataccttcacaaccctctgaccccaaaattcacgtgtgttcaccgggaagagccgggagagctggttatttttgtttgtttgtttgaaaacacagctcaggttcagaggttccctaacaccgagaaaggcaccggtcccgaagagggcctgcggccattgtgtcccaagcgcaggtgtcaaacgccggccgcggcgcccgcagggtccgtcccgcacgctccttctcaaacaatgactttgctgcccacgagcagagaagcctggactccagcgcagtccgcagcgcgttcgttaaggagcccaacttcggcttcttagaatgcagcccactttctagacgcccccggcgcacctgcctcgaggccgcgagaaaggccagctccggccgggagccggggaccgggaagcgcgcagtcccgaccttcctcccctgcctttctcttccaggaggtttactagaactccgggaactccaaaacgcgacttttctttctctttgcttttcgtcttaagggaacacggtgggcaaaagaagggagtgcgtgtgcccgaggcttgggagccccctgtgcagtgacctaggaaccgctagcgatttcttgaaaaattactttaatcaagtccggcgctcccgggagcgggggaggaaaggcagcacccgctcgggacgggagaaaaaagcctccaggtctgtcccgcgtctccaactcggcgagggtctccggctccccagtccctctccctgccctgctggggcctggggctttggggagggaagagcggggctggggtctaaggaccctgggccgggcctggctctccgccggccgggcctgcgggtgtcggcgacccgggggctccgcgggcggctcgggcgctcacagagcccgcgtcccgcgccagagcggtgaggccgcagggccgcacggggcgcctggctgggtgcgcgctgggagcggcgagcagccccgcgcccgcgttttgatctccttcccccctctaagccgcgtttacaacttcaccaatgaataacccgcctctcttttcaacctaatcacggctctttgtgtatctttctgttgatgatttatagaaataaattaataacaccccaactccacgtgctgcagtttatgttacgtctcagctgcggccagcccggcgcggggctgggtgcggaggggcgccccaggtccttccagcgccgcgctagaaagcgggcgcctgcggccgagtgggagggcctaggccctgtggcccccggtggccggcggtgggagcctggttcatccgccaggtcctgagcgacctccccggcagccctggcgccccagccgctcctaggggccactctctcgacccctcttagcctccgcgactcacaccttccgcctcgcggaactctcttgcaggagttctctcccggtaggggagaaatcacctccgggcgggagagcgacgagggaagaacctcaaacctatgaattataccaaagtgtgtttggggaaaaaaaatctacaagttcccctgattgttttggctagagggcaaaccgccaggccctcggagcacaaattcaaatgcaaggtcatatcccaccccaaaccgccgctgcggacgtgcggccaaggctcagccccgaaatcgcagcgcttcagtgtccgaagccacgcgatgggctctgtcctaaagcggagtggcccgggagcgacgtgctgtctcagggaaccgctcggctccttagataattagtaaccagctgtcaaagtctagggcggtcggggaggacccacaaacgatcccggccctggggatacactgccagccggcctgaactcccggggagaggccgggggtgggcagcgaggtctggaaacgccctcctttctcagactgagaccagatcctctgcgaactgaggtctgagacgcgttcgcccccacaccaccgcgcttggtttctttggccccgcgcgtgtccacccggaccctgcatggaacatgccctttgcaaatctaaacccgcgttggggatcccggataattccgggccttgcatgggcgcggctaacaagagtgcccaccagggaactcgcctcccagatcccggctccggatgccgcctgtccttcggcaaagaactgcaggtcatcatgcaggtcaatgtgtccgaggccgacatgcggctttccagacccgaggcagggcgcaggaaaaatgcgcggcctggggcttgcagcggcgcgaggctctgctcccgggaagtcgcagcggtttcactgcacccactcgcaccttcagtcgcgtgggcaaacctcccggcaaagggctccacagctccagttctccccggcccagccccagccccgcggggaaaagcccttgggtctcggacgctggcctgggcctggggagaagaagcccggtgggccgcagggtcgtcccgctaagggattgggaagggtccgggtgttgggagagaagcagagcgccccccgggggacttctctggtgggaaacgggcttggcgagtgtggtcgggcgcagtgtcactcaggcccggggccggggctccaggggttcgggtgggtcccctccacctcgctctgcgcctacctgagcatccggtccacctccgcccgctgctccgccgcctcctcggtgttgagcgcctgcagctccttgaggatgggaggtgtgtcatagtcgtcgccgtcctcggagccctcgtcgccggacaagcggcccttggcgtggccgttggtgagagtatggaagaccggcttggtgtcgggctcggccccgctgccaggggacaggggcagcgtctccagcttcaccccgaagttcggggatggcagcaactcctccaaggcctgaaccagcacctccttggtgaccccggagctcagcagggcgctcaggagttcttgctggagcgacgtgagcttggacaccattttccaaggacggaaaaagaagggggtgagggggtgggtgggtgcgagagaggagggtggaggggagtttcacaagcaaaccccaaatccaggaacccctccacccttcagcctccagacacctgttactccccggggtcccggaggctcctccgaaaggagtcagaaaacttctaacttgccatgatcgccaccattaggccatataagatatgcaaattagtgggaagggcccagctttcggctggatgcaaatgatggtggggagggggaaacccggagagagggagagccggaggggcagacctggagagcagaagacctgggccgggagcggggctttgccagggtccattgtactcacgctggggggctagagaccttcttttactggttctgcttatcagccaaacttcacctaacctttggacttgttaagccagtgccttgcagcctaggcgcggggcttttccaccggttctcagttccgctttagtccagagagaagacactacgcttcggggttcaggtgagagccagaggaagctggggtgctcgtggaagaaggggacgcaggaggaagcgaagagtagagaccctggatgcgtcccggccgacgcaggtggtgggccaggagagcccgcagggcggaagagaaactgaccacttaggaaggggcgccgaggccacgggggaggtgaggcagcgttaggtgtggtgagcatgccctggagggactccatttatttctacctcggttactacctccaggccccagaacctccctggcctggtctggcggtttgggtttgcagaactgcccgccagagagcgtaggcgagggtgaaggagtccgggagaactcttggaaagagactactttatgggtagagggagtagccaaagtgaagctcccccagcagctgggctgcaccggcgcccagcctggccacgccactggggagctggacccctggggctcctcactctcctgtttaaacccggatgtcaaggcgcctccgccttgggggaggatggtgaggcagaatggtgaggcactaggatggtgaggcactaggatggtgaggcactaggatggtgaggcagtgaaagcaaagcttgacctgcagctgggtggacacttgcagccgagggtccccccggcccactcatttctggtttattcgtagttccagaacatctgtggttccctgggccggggacgagctctgtagacgaggtcactgcagcagtggcagaagtcttgcactcctagtacagaaggtgtcgacagagctactgagggaaagatgttttttttcccactctggcctgggccaggtaggaagccataggccttgcagcactattggagtttcacctgcttcccccctggtgacgggcaggaggggagggcggcggaagcgcgcccaaaccggcaagctaggacctgacctgtagaagaacagggaaaggggcttctttgcttccaccacacacagacctaaagcttctggggaggagcataacgcttcccttctgggagcctcagtttcctcatctgcaaaaagaggataccactgataacctttttttgggggttgtgtatattgactgaggccacttgtgcaaccgcttggtctaataataaagttcaacactttctggtctgagaagacgggaagccagttcccagtagtaaaactgagttactctggaaacttagggtattcagaattggtgatacagtgctggggttggagggattgggggactagggtttcagaatcagcagaaaaattgcaaaggagtttctaagcacattttccttcctctcccacccttgaaagatatctaggaggaagtaaggttaggttagggatagagaggaatttcagcaggaggaggaagagtctagcagctctcatctgcctaggggcaggatctaatctcctaggtgtgcaagggctgatggtgtaatttatcaagtcaggctgttaaggagctaggatgcctcttaaatacagggtctgctacaggtgcctgggccacttgtgctgagagccagaaggaagcgggatggttgtgtgcgtgtagcctgaggaaagtttacactgatctcagtccctctttcccggagacaagcaaatcccaaattcaggaacctctccatccttcagcctccagacacccattactcctcagggtgccacagggagtcataacttcatgaaaatgttggcttttcatttcaccttctttccctctagtttgttgtaataggtgcaaatctttgcttctcataattctgcccaatggaagaacattctctgcctacccagcttgcctcaagaaggataatgaagtgttcagagtaaatgtccctgaagaacaatctcttcgtctgtctctcactcgctatcaggatagaagcatcaagtgtaatgaagatcagtttctgtgttaagctgggaaaacccatttaaaaaacagcaatcacttctgttgtaacaacaaaactttgattggcagttgcagctgctgtgtgccccatctgattcccaagcctcattctctctcaaaattcaggtgtcagcaaacccattcttccccacaccccagctaactatgtgaatgtgcaggcaatttcacacagaggataggacaaacttcctatgagtgtccaggtatgttttccaggtaatctggctattcatatctagcaacttcctgtaatgctccttcctagtcctaccttgtaatatgccactttgtgcaatataagcgcttatcaagtaattgttctgtactatagatcttcaaacagattcaccagtcccttcatatggaagtttaaaaagagctgtgtaaagtagaccagcagatagtctttcagaatgcagttcataatgttaagtgagctatcttgtaaaactcttcagttaaacttcccccaaatagaggaagacggagtaggattgaaataacatctgtttatgcttcacacagaataaagtcgtgatggactgatataataactccattttaaagatggaaaaataagatatgggagagtctcaggttgcttgtagccacctcagcaaattaatggaagggttgaggttggggctcagaacttttgagcagggttttaggatgaaagaggagggtctctagctgtcattgttttgagggatgagaagttgaaagagggattctgtgggggagaggtggaggatacccagcagagaatagagggcagggtttggagtagtcaaacagaactaaacttgaacccaagatctgcttcacctgctgtgtgacttttggcatgttacataatctttctgatcctcagtttcctcagtgcaaaatgataatgacactctactgtgccggtgtgaagattaggtgagttagtaaccacaggttcctagaatatggtgggctctcacgtatttagaaagaagaggcacatcttgataacatgctgagaactgaggcaactgatgtctttaggctcttatagtcccagcatgtttttaagagctactgaatttgaagagaccatatcagtttcatctgctcaaattagatgaatttgcagttcatatcccaaggtttgttgttcttgttttttataggacgtgcaatccctggtataaaataagttgaaatccagttgactcatcattctatgaaggtgttctgagcaccatgctggtcattccacagattggcaaatgtggcttctgtgaactcatctcccctggaacttagcagcacaagcgatatttcttttctgatttgtgcatgcaatctttcccctacttttcacggttgcacttctttgtttacagaagagattctggtcatttccacccctgccactccactctcccagcctctctcattggttcacagagtatctagaaggcctcaaaataaaatcatctctagagtaaaacataaataccatcctaacctgttctgcaggaggtcaggggccttcttgttagagagcagtgttgcaacctggagaacattctagacatcagggtctggaaagagcctgaggttcttcttctggctacaaaacctctttctgggtgattcatctccccaaaagttttggtgagcaccttctctgggtctctgattctacctttgaaaaatggctattggtctggataaccatttaggtcctccaacttttttttataatttgaaattcctaaaaggtcttaaattattagggtgtctacttgcaggccttcgggcagatgggccaagagctcaggccagacctctgtgtagtagtggacatgaagccttgactagccacgaaaaaatataccacagagagcaaaccctatgaggggcaggcatcttctcatgtcttactcctcagtgcctggagaagtgctggtgcatggtagatgctcaagaaaatgcttactgagtaaacgaacatgtgattgcctctggacaatactgttaaaactaaatacttgccaggtgtggtggctcacacctgtgatagttctttgggaggccgaggtgggaggatagcttgagcccaggagttcaagcaaaatagtgagaccctgtctctacaaaaataaaaaataaaaaaattagccaggcatggtagtgcatgcttatagtcctggctactcaggaggctgaggtgggaggatcgcttgaacccaggagtctgaggttccattgaactatgatcgtgtcactgcacttcagcctgggtgacagaatgagaccccattctctaaataaataaataactactttcaccagacacgaaagagtatatactgtgtgattccatttatataaagttaaaaagtggaaaaacaaatccgtggtgctggaggtttctggggtgctagaaatggttctatattttgattgggatggtggatccatcaccaggctatacatgtgggatctgtgcatgttgccatatgtaagttataaattagtataaagtaaattaaataaattactccaagtataaaatgtaaacagtgtggggccgggcgcggtggctcatgcctgtaatcccagcactttgggaggccgaggcaggtagatcacaaagtcaggagatcgagaccatcctggctaacacagtgaaaccccgtctctactaaaaatacaaaattagccaggtgtggtggcgggcgcctgtagtcccagcaactcgggaggctgagacaggagactggtgtgaaccccggaggcagaggttgcagtgagccgagattgtgccactgcactccagcctgggcgacagagcaagactccatctgaaaaacaaacaaacaaacaaaaaaccaaagcagtgtaaataatattcttacccccgtcaacagtttacagttgatgttcggtcctccagattttttcctattcatcattgtagttaatcatcattaaggtctatagcttagtatattccaggagtcagcaaactttttctataaagggcaaaatagtaaatattttaggttttgtgggccagatggtctctgttacaactactcaactctgctcttatcgacaatacataaatgaatatgtgtggctgtgttccaatgaaacttatttacaaaaacaagtagctggctgcatttggcccacgtgtcagtttgtcaacccgtggataaagcacttaggccactagaagtccacagatccaaaagggaccttaaaatcatcccctttcacgtcttcctctttgggataaggaggcaaattcagggaggataaatgactttcccaagagcacaggaccctgggagaatcagttctggagtcagatgggccacctgctttctgggagtgtgtagccataactttgggcaagttactaaatttctttcagacttatattatcaccaaaggtaaacagtgataatggaattcataccttataaggttgttggaagaattaaaggaacacagaaaaacaccttgtgtggggttggcacgagctgggaacacatgaagtacttgcttgatcacagcacacggctcagaggctccctcatgtcctccctcccttccttcgaaatgcagagtttctggcctgagttcactaacaaacactaccgagtgtctactctgcgtggagcactctggggagcactgtgaggaaataacaaatggatacaggaagattccagatcccaccaatccccactatcagcttcctttccagaaatccctttcggctctgagcttttatttcccagacatgctgctattaggtgatcattgccagggaaactcctaaaggtaaagaagatttctctctcattttgattcaacaacccacatccttctgctaggtcattttttagaaatagggtattcccagtagcttgtaaaagattaaattaaaaaccggcaacctagtatgatattaaactaataaatactacacctaccatagagagccttcgctccagagcaaccacctacttctctttctttaccacaacatccgtgaaaaatgagattggcggttggcccagcacacagaaggtgccccatgagtgtttatggagtaaatggtgggcccggcacacagcaggtgttccataaatgtttactgaataagtgatcatggctaggctgcggtgtttcggaaaaaaagcaataatctttactagaattttctggaacctgttttcagattaatatttaaataaataagtgttattgaggtgccctagctacactctctcctttttcctccctcacagacctatgaagtaggcaatatcctccatccctgctttaatgatgaggaaatggaggctccaagagggtaaggattggcccaaggacccacaaaaggttaaggagcagaaccccggactcgcacggaggacccccagatcccatgttaagtgcctcgtttgtgacactttgacaccttccgagccccgaaacaggtgggggcacacacagaagcaccctggaaagtctcagcacagggagaaatcttgtgattgctttagagagggagagagagagggagaaaggagacaggggacagggtgagagagatcagtcttccctgtcaaaggagatacctggcacataaagaactacgctatttatacagtattttatggtgtgcaaagagatttcctctttcatttgatcttcaaaagagtcctgcaaagaaggcaaggcaggcactactacccacatttcacagatgaggaaactgaggcccgaggaaaaacgacccccaaaaggtgccagaatcaccacctgagacttccgcatctagaacccagtgttttctccacgacattgggtttgtataatgacaagatcagcacaaagcacagcccaggaagagggaccaggcctaagaggaagatacaataagacacctcagtttctgctcctgatgccatgcttgagtgaggcaaaggctttttccttcctctctggtaaaggttccaggaaagagttcgatctgtgagtcaacagcccctgcccacttgatgttatcctgtttctccccaacgatgagtcttctctgattctagaggtcctggttgcagagcaggagcgaggtggactctgcctccactcaccctactgtgtctggtcgggagtgctgtccatgacctgtgccttgggcatgagagttaccactcagcctcacactaagggatgaccgaggtatccttttgtgctctgatgactatgccctgtttccaggcctgggggtgaagagccatgcagggctgctgagtcaatgcagcaaacatttatggagcatccgctatgtgctgggcatgcagtcagtgtctggcactgctggagcaaccagattcacttcctgctctaaaggagttggttatccagagggagggacagacacggacacacacctctattgctagacagagtggagcaggcttcatcatagcactgtgctgattgctttacacaaagcatctcatttgctcctcgtaactgcccatgagacagtattattattattatttttagtgttcctaactgatgcttaaactgttggagttgcacagagcttgttcttgctcagattgggttgagattcaaatacagctttccctggttttctgtaccagccgagaggcaggtgccacagggaatcagcatggggcttggagtcagcccaatctgggttgaaacctgtctctgctgcttttcagatgtgaccttgggtaagctgacactctgaacttcagtttctttatctgtaaaaaggaggacagtgtagaaatttgcaggccagatagtatatgtaaaccccctggcacaattaataaatagaagcaaatgtcaataataataggggaaccaacaaaattccgtcggggctcagggcccttgaagagtacatagaattttgacatcaaggagaagccagagaacatttcaggcagaaagaagagccgagccaagcatgaaagcaggtaatgaggcgacgggggaggagggcaagctgggctgcctggaccacggaggaatcttgctaacgatgacactggaaagtaaggacagggctggtcatgggcaaacactgaatgccaggcctgggggtctcatcctctctccttagccaatgaggcatctcaaagttttcaatggcatatgagccattatttaatttgcttttttttaaaaaagaatgcttgtaacaacaataacaatagtagtgactacttactgtgtacctctatcactgtgcgaagatttacagtgtaatgtcatctgatccttaagattatctgaggttactggttttttgtttgttttgttttgttttgtttttgagatggaacctcattctgtcacccaggctggagtgtagtggcatgatcttggtgcactgcgaactccaccttccgggttcaagcgattcttgtgcctcagcctcccgagtagctgggattacaggcatgtgccaccatacccggctaatttttgtatttttagtagagacaaggtttcaccatgttggccaggctggtctcgcactcctgacctcagtgatcttcctgcctccacctctcaaactgctgggatttcagacatgaaccaccgtgcctggcctgaggttactcttattatctccattttacaaaactgagtgaaatggttcaatatgaagactgtagccaaattgccaggattcagattttggactcacagctcactaactgtacatgggcaacttactaaacctctgtggggctcaccattcccacctttaaaacggggatggagatagcatttacctaacagggaggttgtaaagagtaaatggtcaatgcatatataaagtaattagaagagaggctgtcaataagctcccaatagctcttatttgatgatgactgcccaaggtgacacacttagagagaagcggtcccagtgggttcattgatggagaccctccagtgagcctttgtccacaggaggtgagtgaaggtgttgtggggcagcacagaggggaagaaaccagggcggagatgagggtctccgtggaaggagcctctccaaggttgctgatgggtgcccctcggctttcacgcaccagggccttaggaagagtgagtcacagccccacaccacatgcaggtggaggcctagaagttcagcaactcaccagaagccacagtggggcaacaggaaagttcagatataatctatgtaaggttaaaagacccctatcttactcaccctctccccacacttcccatgccaaaccattctccctattagcccctatagctccttgctaatttccattcctatacctgttcacctgccgcttcctccacctggaagagctccttccaggcaaaccagactttgcaacttccctgagaatgtggtttaaaattcatgagccgctggaagctttcccgactagcgctgttccttctaatcatcccccctaccccaccccttaaccttctgggatcagctgagagctcgagtcctttgagaagccccacctgaccctaggttgagttattactcagtggttctcacttgagcatggttttaactcctagggggctttggtaatgtctggtagggtcagcttcatgagtgtgcttggggtttaatgcactgtagttgccatcttgaaattcttaatagttttatctttgactttgtgttgtgtagatgaagctgatgggacaatagagcgtatgccaggggcttagtctcagttcatgtggtccccccttctgctgcctccttgcctttctggcatgggtttcaggtcccagctctccatccactgatgcccctggcctggccaggcctctctcttcctactcccactcagcaaccaccgctgccctctctgtccttagggggtcttcatgtgggcatggagaggttgagatagtgtgcttttgcggcacgacatctcagggtggagcatggcagtggccatccctgacccaggctggcagtgccatggagcattaggcaataggctacatggggagcatgctttttacccacctctggaccaagggtgtccttgtgccatggttgtaatgcccttgggggatgtccatctgccatgggctggggcagcgagttgtgggaagggagacctggtttgacttccatgccctcggaagggcagatgcatggcccagtggctggtcagagcggggacatggcagctggtgggttgcatgtgtgtatatgctgagtcatggggtggggtcaccagacacctacaagggtttgcactcaccctgctagtgtgcctatccctagggaatgaaaacactttgtatctgagtatcttcaatggcactttccctctgctttatgaacgaagggtcccacactttctttttgcactgggccttgcaaattatgtagttggtcctaatgtctagagacgtttttagttgtcatggctgaggggggtgctactggcatctagtaggtagaggccagggatgtcgctaaacataccacagtgcacgggacagcctcccacaacaaagaattatctggtctaaaatgtccatggggctgggcgaggtggctcatgcctataatcctagcacttcgggaggctgaggcgggaggatctcttgagcccaggagttcgagaccagcctgagcaacatagtgagaccccatctctatttttaaaaattaaaaaaaaaaaatgtccatggggctgaggttgagaaacatgggattttgtatacttcctttctgttcccacgccctctgtgctgatttctgtcctggctctttgctcaggttgtggaaatgacctcattacgtgtctagaccagaagttcctcaaagacagggttgaatttttgtcaatctcagatccttagcaccaggacctaaggtggtgatggggcatagtaattcactgactgtactggcagacaagctgatgaacttactttatcatattttaacctattgttttgtgtgtgtgtgtgtttgttggaagtctaaaaccatttacagccgttcttgaggcgttacatgattgttgtatctttcctaagtggattgtaaatccctaaagcacaggaaatacacttttttttttttttttgagagggagtcttgctcttgttgcccaggcaggagtgcagtggcacgatcttggctcacagcaacctccacctcctgggttcaagtaattcttctgcttcagcctcctgagtagctgagattacaggcatgtgctaccatacctggctaatttttgtgtttttagtagagacagggtttcaccatattggccaggctggtcttgcactcctgacctcaagtgatccacctgcctcagcctcccaaagtgctggaattacaggcgtgagccaccatgcttcaccaggaaataaactgtctaagtcttctgtgttgctcagttgtgcttagaacagtgcactgtatgcagcaggtgctctgtaagcaacaacgtcttttgctctgttctgtgtctacctttctgcatgtccaaggcccagattacattcatttattcattcaacaaacatccattcagaatttactataaatttcttttcttttcttttcttttgagacggagttttgctcttgttgccctcactggagtgcaatggcgcagtcttggctcaccgcaacctctgcctcccgggttcaagcgattctcctgactcagcctcctgagtagctgggattacaggcatgtgccatcacgcctggctaattttgtatttttagtagagacagggtttctccatgttagtcaggctggtctcaaactcctgacctcaggtgatccacccacctcggcctcccaaagtgttgggattacaggcgtgagccactgctcccagcctaaagatacaatttctattctcaaggagttcagtgtggccagggagttagaaagtttttttgttttgttttgttttttttgagatagagtctccctctgttgcccaggctggagtgcagtggcatgatcttggctcactgaaacctccgcctcccaggttcaagtgattcttctgcctcagcctcccaagtagctgggactacacgtgaatgccaccacgcctagctaatatttgcatttttagtagagacagggtttcaccatgttggccaggctggtctcgaactcctgacctcgtgatccgcccgccttggcctcccaaagtgttgggattacaggcgtgagccactgtgcccggccagaaagtgttgtaactccatgtaattaagcatcataattgctgtgaaattagccttcagaaaactaatgatcaagaagagagaaaattcagtagaattttaattccaccagaattagaaaattatgtttgtaacagagagttctcaagctcgtttgggtttgtaactcagacctttgcagcagttggtttgtttgttcaacaagtatgtgtctgtgtcaggccctattctgggtactggtgatgcagccgtgaatgaaacagacaaagcccctgtcctcccagagctcacctgccagcaagagccagggacaggcagcaagtcaatccgtggtgtatcacaagaggatgtatgattgagaacaatgaaagggcaggggacagtgaaaaggcagtgtgcgggactctgttgtaggtgagggatcttcctggggaaggaggttcaaaagtgacgtgtggctggaaatcaactcagacttcttgggatgttggtgtgctccacccaccctaccatacaggccctatgcatgcccagaaatcccttctgagctgcaaagacactgactataagtaggaatgagttgaatgaagtgttgctaagtttttaaagggcttttctttaaaacatttgtgtgaaaatatttttcccaagttactcctctcaattaaaaaaagtttgaacacctcatttccactatttgtatgaattaattaattaacttactacatgtgctaccatactaatattttatgctcattataagactaacacaagaataaaaagtatggagttaacataaatataaaaataaggctgggcatggtggttcacgcctgtaatcccagtacttgggaggctgaggcgggcggatcacctgaggtcaggagtttgagaccagcctggccaaaatggtgaaaccacatctctgctaacaataccaaaaaataaataaataatagctgggtgtagtggcaggcacctgtaatcccagctacttgggtggctgaggcaggagaattgcttgaacccaggaggcggaggtttcagtgagctgagaccgcaccattgcactccagcctgggcaacaagaaagaaactccgactcaaaaataaaaaaaaaataagacccaagattttcatcctgtaccctcaatatatcagtttgtgcttccccctcttggggacccctgttctaaggtagaaaagtactaaatactattttatttttggataagaagaaacttgcctagaggtcactagacagacacctctcaggacttttttacgatttggaaaagaataagggagattgaggtacaggaggagagagaaaggcagaaaggaagaaaagaaaagggggataatgaagaaaagaaataaaagaaataagctttctttttttaaaaaagaaagcaagataaaagagaaggagagaaggaaagaaaaagaaagaaatgaagaaagaaaagaaaagaaggaaggtaagaaagggagagagagagaaagggagagagaaaggaagaaagggagggagagagagagagaaggagagagggagagagggaaggagagggagagagaaaggcaaaaagtaaggaaaaaatacccccaagacgccactggacagaggcagtgcctgtgctgtctgcccggcctttgctcagacctctcagtgttgtaagaatgttccgtcacagtccataggctggaccttggcctctttccacacattcagaaccaccagctaatgcaatggagattgctttctggtccagctctcttacccgatggccagttccccttcgtggccctcacttggcagtggtgtcaggagtgatgtggaggctgaccttttcccatcactgtcctgcacaactcattaacttctccttgcagctggagatgaccattatggagtagaagagctgacaggtttttcagagagcagaggaatgcacagtttcccagaagttcctgatccaggagttctcgcctgtagagcatgggagataatctggtttatggggccatcagaagaaagtcatgttccaagctcttaaagaaccctgagctctttttctttttagactcttgcattaaaaacaaaggaatgagacaaggcacttcagtgtagaatggatcaaggaatacaaaataaaataatgaaaaaatgctatgcaaataatacaaacataaaaacacaagcaatgtttcttgaatgaaattttttactttcaaatttgatctagccctgcaccaggaggcatgcaatttgttgaaggaataaatggtgaattttcacgataattctgtgacaatgcaaggtggacaggatcttcatggaaccaaggagactgaggccccagaacttaagggcccaaggtcatacagtgagtgaacaggtgtcaagaccggtcctccattgtcaccagggcactgcctccatgcaggcctttggtttcctttgggaagatttatcacttgcctagctactctggtgaagtcattgctttagggcaatgggactgagtttaaacatattgagcacctaaagaagacaggcatgtatcgggcatggggtggtggggtggggtataaagccgtgaagctggcccctgcccccaggaagctcacagcccatgacaactgcagtgacccttatgcctgtcattttcattactgtcttccctgtcttgttattgaatattattgtaatctatgtgagcattcaccttttaaaaaggcttttagtttttgaattacaaaactgataaatatcaccatataatctagcaattctatttctgggtatatgccccaaagaattgaaagcagggtcttgaagagatatttatacacccatgttcatagcagaattattcacactagccaaaaggtggaagaaactcaaatgtcttttctttttttttttttttgagacggagtttcactcttgtcacccaggctgaggtgcaatggcgcaatcttggctcactgcagcctccgcgtcccaggttcaagcgattctcctgcctcagcctcctgagtagctgggattacaggcgcccaccaccacacccggctaatttttgtacttttagtagagacaaggtttcaccatgttgtgcaggcggtcttgaactcctgacctcaagtgatccgcccacctccgcctcccaaagtgctgggattacaggcatgagccactgcgcccagcttcaactgtctattaagagattttatatatatataggtatttgtttattcattcatctctcaatagacacaataattttccattatatgtatacatatatagcatgtatacaacatatatacatacatatatacattttatatatacatgtatatacgtatacctacaatggaaaattattaagccttaagtaggaaggaaattctggccaggcgtggtggcttacgcctccatctcagaaaaaaaaaaaaaaaagaaggaaggaaattctgacacatatctcaacagggatgaaccttgagaacgttacgctactgaaataagccagacacgcaaagacaaaaactgtatgattccacttatatgagatatctagagtagccaaattaatagagactgaaagtagaatggtggttttcaggggctgggaggtgagggatggggagttattgtttaacgggtacagagtttcagttttgcaagatgaaggttatggagccggatggtgctgataattgcccaataataacaatgtgcttaaaatactattgaactgtacacttaaaatggtcaagacagtagatgttatgctatgtgtatttatcataatttaaaaagatcaaatagacattatgataaattccaataatcaaaacttactaaagcaaaaagagaaagtctgctttctcacctgtttgtcacctctcctccttgagatttattctcaatctcctctctttatctaggcaattgctattcagtttatttgtttcctttgtactgttttgcctgcttgcacagatatacacacacacgtgcatgcacacatgcatatatgctattaaaagccaaaacggggccgggtgtggtggctcatgcctgtaatcccagcactttgggaggccgaggcgggcagatcacaaggtcaggagattgagaccatcctggctaacatggtgaaaccccgtctctactaaaaaaatacaaaaaaattagctgggtatggtggtgcgcacctgtagtcccagctactcgggaggctgaggcgggagaatagtgtgaacccaggaggtggagcttgcagtgagccaagatcgcgccattgcaccccagcctgggcaacagagtgagactccgtctcaaacaaaacaaaacaaaacaaaaaaaaaaaacaccaaaacagatcattgattccttcttctccctttcccccttgtacactcctcaaagggagccaaaaggagaacttaagaatgtgggtggtgggaacagaaggctgactggaatttccattcctccccttactcactatgaccattcactagtgatttaatttctctaaagctcagtttcctcatctgaaaggtgggataatattattgctgagacttaatgaagaaaacaatggaacacgctggcacataggaaacatacagtcagggctgactggttatgtgcttctggaagtttcttccataacgtgggctctgtgtgcagtcagggctcaaggaagtctgtagcaagaagaggagagcgaaagggagaacctcttagcaggcgctatgttcatgcctaggatgcaggtatcatcttccccgaagggtctagttaagaagagttattggccaggtgaggtggctcacgcctataatcctagcactttgggaggccgaggcaggtggatcacttgagccgaggagttcaagatcagcctaggcaacaagtgagaaccccttctctacaaaaaataaaaaaaaaattagcctggtgtggtggtgcacacctatagtcccagctactcaggaggctataagcaggaggatcgcttgagcctgggaggttgaggctgcagtgagctgagatcgtaccacttcactccagcctgggcaacagagtgagactgaaaaaagcaggagcagcagcggcggcagcggcagcagcagctgcagcaacagcattattctgttctttccagtgatgagaagcagctgttacacggtggatatccttttcaaaatagtagatcctggaagtgaaaactcataatataaacttctaggtacaggtgacagaacagaatccagaaagcatttaggacccgggatacatggataagtgattataggaaggtcttggggtcatggaatatgtgcagcacatggggtccagaggtctgagttcaagttctaccttaaggatatatatatataaccttgagtcacacacactatacactcttttttttttttttttttttttttttttgagacagagtcttactctctcacccaggctggagtgcagtagtacaatcttggctcactgcaacctccccctcctgggctgaagcaatcctctcacctcagcccccaagtagctgggactacaggcatgagccaccatgcctggctaatttttgtactttttgtacaggcagggtttcaccatattgcccacactggtctcaaactcttgaggtcaagcaatccacttgcttcagcctccaaaagtgttggaattacaggcatcagccaccatgcccagcctcagtttccttccccagaaaattgtatatcttgtagggttattgtgaagattaaagtggaatgtgcatgcaaaagtactttgcaaaccacaaagctctaggttggagtaaataactgaacttttaaaaaaaatttactttaagttctgggatacaacgtgcagaacgtgcaggtttgttacataggtatacatgtgccatggtggtttgctgcacctatcaactcgccctctaggttttaagctctgcatgcattaggtatttgtcctaattctctccctccccttgccccctacccaccgacaggccctggtgtgtgatgttcccctccctatgaatgactgaactttatatcaatgcgtttgtgtcaatgttctgctataaagcactgcaatcctttttaacttttaaaaatggaaataacttttttttttagttcttggtaatatacaatcattgtaaaaaattaaagcaaaatgagaaagtgcaagtttctttaatctcaactgttgctgacactttctaattcttatttatttaatgatatctcaatatattaactgaaaaaagtttcaaacatttttgtagtatggtcctatttacggcttaggaattactgccaatcaaatattagtgacaagaataaacatgcaatacgctacgttaagattatatgatctcttagagacttttataattctcaaattctatcaattattgctgaagatcctttatgtatttaaactagaatagagtactagttagaatttaggttctacattggtaaaaatggagataatacaagtgcaaattcatagtttgaatgaagattaaattagataatgcacagtattttcataaagcaacagaaaagttagttgctatgattatcaataatacatttaggttattttgttacttgcttttgctaaaggacttgcttattgatgaccacagggtagtttatctgattaacctgtgattactggggataaataaagtagaaggctttaggaaataagattgttaatttacaaggttgggaggtagtgcagaagtaattatgaagactgtggaggttggaagcagtgggtggggacaagtaggtagtccggctaggtgatggcctgggactttctgatctgtggtgtctggctgtcgcttctttggtcataaactcttaactactgttcctgagatttcatgtgcatttccctatacaaatctttagtgctactgccagactgttaatatgtgaggagatagtgcttgctttttttctctgacaatgacaagaaacttattatatgaaccacgtcaaaattccatagtaatttttttctccatttgatctaactccaaagtcttttccctacctcttattaaaatttaaatgttatacgtgcaacacttggaacagaacaagaggcacaggatcttttaaagtttaaaggttacttttaaaaaatcacatttgctaagggaatttcttctgtatctttgaaaagctgttaaaatacacacacacacacacacacacacacacacacacacacacctctcccagctgtcaatgaatggtataaataacaattgtgactttaaccacaacaaaaatgtgttacttcttaggtcgtctttgaggttttccttttaggaactgtttctaggagccaagttttggttttgttttgtttttttttttctgcgatcacggctgactgactgaggacttcaggctgtttacgcgggagagctttagatatgtttatttgtatggcattgtatcaaggccttcaaatatttgctgggaggtttggtggaaaatgtctagaccagtgcaaacactgcaggccccagagaaatccaagaagctcaaggaaccattcaagaacccgtgctttatcctattgtcattacaaggaattacaaggaaatcttctgaatctttgtcagactggatgagcccatcaaagagggtccaagtcaataaaggatcttgatttcaccacgcctggtttcgttcattccacagcgatgagaagtagagtggaaagccatcgatctaagaggcaggcgagcttcataccagccctacatcagctactcacttgctggatcactctgccaagtcactggccctctcggggctctggttttctcaggtttaaatgaaagtggttaagtaaaagaatgtctaagctccctttctttgatcctatctacctattaaataacttttaagtgtagtcattgaaccaggtctgcagtaaaagatacaaagaaaaaaatataaaatgagatcccttgtctcaagaaagtttgattggatatttaagcctcttttattatttctcagctcctaggagtttcttggaagctcataatctcacagagtatatgtggccacaggcaaatacataataaatcatttatcgatgttacatcacgagataaaataatatcatctatgttgccgggctttggggccacccaggtggccaacacacaaatagatacacctataataactgttattttatgtgtaataacagctatatcgggctcctactatgtacctagctctctgctagatgttaaaagccttatctctgaaaccctcatgacaatcttgtaaggtaggcagtgctatctccgttttacacatgaggaaaccaagactttgagagattaaaaaacctgcccaacattggccgggcatggtggttcatgcttgtaatcccagcactttgggaggctgaagcaggaggatcacccgaggtcagaagtttgagaccagcctgggcaacatggcaaaaccccgtctctactaaaaaaaagaaccaacaacaacaaaaattagatgggcacagtggcatacgcctgtaatcccagctactcaggaggctgaggcaggagaatcgcgtgaacccaggaggcagaggttgcagtgcgctgagatcacgccactgcactctagcctgggtgacagagtgagactccgtctccaaaaaaaagaaacttgtctaacatcatgtagctaagaaggggctgcagctctttcgattccaaagtctaatctcctttcactgtacctctgcctctgggtttaatgttttgcatttttttggtttgttttttgctttgagatggattctcactctgtcccccaggctggagtgaggtggcgcaatcttggctcactgcaagctccgcctccctggttcaagccattctcctgcctcagcctcctgagtagctgggactacaggcgcctgccaccacgcatggctagttttttgtatttttagtagagacggggtttcaccatgttagccaggatggtctcgatctcctgacctcatgatctgcccacctcggcctcctaaagtgctgggattacaggcatgagccactgtactcggccatgttttgcattttaagaagctatatatatattctctctctctctctctctctctctctcacacacacacacacacacacacacacacacacacacacacacacactccgggattttgaagataagtagactgaagcacaggttgcttaaatgatgtgtcccaaatcccttcactagagactggcagacgagggacctgaatgaagccaggtgctctgactcaagaaaatgttctcttaccctgcagcaccgcttgtgcagcgtgccccagctgacacggttttgtaagattccttgaactctcctaggtggggcaggcatgccacacgtcccctccctgcattgttcatatgctgcttcctattttcttgctcaactctcttgcaatctctctcagttctatacatgggaatttcatctttctagctgctcaggccccaaaacaagaaccaatgacttgtccttttctcttacacctgtatctactccttcagcaaatctgccaaacttccttcaacataaacccaggatctgaccacttcttggctcctccaccattctcctttcagtcacaccaggcatctttcctgtcatcttatttggtccctctgcatcttcccttgctccctacaatctcttctccacacagtagccggaggaatcctgttaagtcagaagccacatcatgtctttctctgttgataaacgctcgaatggcttccggtctcactgggagcaaaagccctatgagacggacttgactccccccatggggcctcctggctctttctggaacacatcaggacacatttctgccccagggcctttgcacttgcagttttcctgccctgggaccctcttccccagatggctgcagagcccactcctcagctcccacaaatgtgtgctaatttgccatctccttggggaggcttcccttgcccacctttattaaaactgcagctcatctcctacccaatgttctccagccccacgctctgcctcctttctccttctaagcacttatcaccgtctggcaaacgatgcattgaacaagttcgttttatttgtcatgtaactccccaactagaatgtaagccccacaaaggcagggtttctcttttgggaggggaggttctggtttgttcactaatataaccctagtgtctacaacaatgcctggcactttgtagctctcaatacatggtttttttgtttgtttgttttgagacagagtctcgctctgttacccaggctgaagtgcagtggcaccatctcacctcactggaacccctgccttctaggttcaagtgattctcctgcctcagcctcccaggtagctacaggcatgcgccaccatgcctggctaattttttggtattttagtagagagagttttgccatgttggccaggctggtcttgaactcctgacctcaggtgattcgcccacctcggcctcccaaagtgctgggattacaggcatgagccaccgtgcccggacccaatacctgttttttgagtggatgaatgaaggacattcattccctgtcccctgacaggtcttagggcctcatctcttcctgatctgcagaccggatcatttttatctcagtcacatgttcagtcttctgagatgtggtatggccactcatttatcactgactctcacttaagcccagttcctacctaagatgctctccacagaggcttgggtgaggctgcagtcatgccagcttctgctctcatcccacattctttgagtttaatgagggagcctccctcaggcaccatcctggaccttttcataagaccctgccttcacagacaacattctcggtttcaggagccatagagctgttgaaggtcaaccattcaacttactgagtattaattattcaaatgtgtctggttgtacaggaggccttcagccagcaatgaaatggagggtgaaccaggatgagggagaaagttcatattaatggcacctctttccccatctcaaaggggtaactgcccttgaaagagcccctgtagttcggggttgaagagagtgcaggagcacaggaggagagaaggctattcaatttgtaatttgcaaaaaaagaagccatttatcaaagtttgtgcttgagatatttaataatagaactgcccttcaaggtttccttaagggtaatattgctgattaaaaaggaaacatgctctctcattttgcaattgaagaaacagccacatagagtcgggtggtgattctcaaaggacaacagcaacccaatcaattctaccccttgtatcaagggacagtcatgttcacctccatccatgagaattatgtcccacgccatctttgcaggagtatgtcatcacgaaagttacctgccatcgagacaaagaaaaagaagtgaaactcacccaccactcaaaccccaaacagtgttgggtcaggggtgagagcagggcaggcagaactgggcagaacgttagcattggtgtcccggctgggatggcctttaaaggtcagccagggcaaacttggaggtcacctgcacttggggaagctgaggtgcagagaggatgagtgactccggggccctggccacacagggggttagtgactaaaaagcagccagaattctgtcaccgtgagtctccacatagagctatgtccagggtccttaaatgaccttggcaacccactgcttttgtacccttatgttccacaggaggaaacagacccataaggcagaagagcaacgaggccaaggagaccagagaagatatttaatgtggacctttaccccattggcttcccttgagtttatttaagcaggactttcggttctttctctcttcctttccttcagtgtcacagcaactttatatcgattttgtctagtccctcaggaaatggtcttgtgaacttgaaaaacaaaggcctaaattcacggaaccaagttagtttctagcactgtctcttctgttccatgccagtgtttctgcccagaaaaatggggtcagtttggtcagagtggagggaagaggagagattcagtggactcccccagagtcatagcttagcaatgagaagacagggatgcataggataatctccccaaattagactatcccactgttctcagcatacagcgggtgctttagcaaataatgattgcattgctttgttaggtgccatgccggaaaatttacaggctaccaattttacaacagaccaatggacaagtatattgatcacccaactactctatgtccagagttataattggaattgtccaaaagtcaagagacatatagctttaccctggggggccttgaaatctcattgggaagccagttctattacacataacacaccttgagcaaaatacaggacagctcctgtataagaccgtgtaacattgatgggattgtagagagaggatttaaaagcaatctctctccatcatcacgcccatgtaacaataatgatagtaataatcatagctgcccttttttgagcagttaactgtagttactaccaggcacatgctaagctctttaaagatatcatctcatttactctggacaacaaacctaccagtactaatattatctccttgtcaaaggtcatgtagctaaaagtgtagagccagaattggaatctgggccccttttataaaccctaaccctaaagccatgtttttagcattgacacccacagcccaccctcagccactctagtcctctgtgtgtaggtagctccttgaaagatgactgtaccttttaaactttctctctgcgtcctctggccaccatgttctggtccagatcagtggtcctcaaactctcggacacccaccacataatagagggtcctgatgagtgagaaagaaaggggaactgctcgtcatctgtgtcccatttgcgtccacccacccctggaagtgagggccacacacacaccctgtcccaatgttgtcactcaggtggaaacaagttgagaaccacagttttggggtcacccctgttgctctcgtcccattttgcactttcccttcctgctttcctgtggctgaccctgctctgctgatgtctgtcttaaaccccaaggatcaaactgtttctgaagctcagccaaccaactctccttcatctcccgggagtctcctagggtcctcagggtgctcccagctcctgagccagttatttttccctaggcgtgttccgatgtcatgaatgccaaatcattgcccccgccttgtggctgtgcctgggaattacagctctcctgctcgtaaggacaactgggtgcccagaatacaggtttacgttgcatccctctcccactgctatactcaccccgtctcccagagtggaagtaccttaagttaacaagcccacttgacatcctcaaattccaccatgccttcaggacacgtcaacattaaaatcaccccggtactgccactacttactaccaccactcaattcctgccaccacgactaataccctactctgcaaccactaccattactactgctaccaccacttctatcacggttaatatcactactacaacaaccattacaacctctattaatactaccattactaccactacatgactagtgctatggtcacgcctaccaccattaataccactactattgccactaccaccaccaccactagtgttactatcactacaaccaccactaatgccactactattaccatgattaccactattaatactgctactactactaccactaccactattaataccaccaccaccaatataccactatttttttttttttaagagttggtgtctcgctgtgttgcccgggctggaatgcagtggtgcaataatagctcactgcagccttgaactcctgggctcaagtaatcctcctgtctcagcccccaaatagctgggactacaggtgcatgccagcacacttgaccaatttttaaaaattttttccagaaatggggtcttgaactcctgccctcaagcaatcctcctgccttggccttccaaagtgctgggattacaggtgtgaaccacagcacttggccactatgattactattaattacactcctgccattatgaatcccacccctaccactgccactcctaccactgttcataccattcctagtaccactaccaccaccactactactattgctattgttgctgctgttactgctgctactgaagacttactgtgcgcttggctcatgatctttttcttatattatctcatgtaattcttacagcaactcttgaagtaggaaatataattatcctcattttacagataagataatcaggacttgggggctgggcatggtggctcacacctgtaatcccagcactttgggaggccgaggcgggcggatcacgaggtcaggagatcgagaccatcctggctagtgcagtgaaactccgtctctactaaaaatacaaaaaaattagctgggcgtggtggtgggtgcctgtagtcccagctaactcaggaggctgaggcaggagaatggagtgagcctgggaggcggagtttgtagtgagccgagatcgtgccactccagcctgggtgacagagcgagacaccgtctcaaaaaaaaaaagataatcatgacttgggagtcctttgaattgtcatagctccctctgctagtaagaggcaaatcaggatatgaacccaaattgtctggcatcagagcccatgcacttaacccccagcgtgaggaagcgacactggctttggagtcagagagacccaggttagactcctcaccttgctgggtaaccaggcgagtgagtcttctttgtaagatggggtttccccttgcaaggctagggttcttttgagaattaaatgagatgatatatatcgggatgtccaatcttttgacttgcctgggccacattggaataaaaattgttttgggccacatataaaatacactaacactaacgatagctgatgagctaaaaaaaataatgttttaagaaaatttacaaatttgtgctggtctgcattcaaagctgtcccaggccacatgtggcccatgggccatgggttggacaggcttgatacatatgaaacatgtagcagaaaggctgcacgtaatccgccctgcctcccagggagcctggctgacctgtcttgtgagtctctgctcacagccaacaataggtcctctgcaagaacctactgttggataactcactctccactcaggccatacatacaacttgttaatgattcattccttccttcattcacccacatatcacacatttattgaacacctcctatatggtaggcatggtgcttggacctggggatgtggtcactgcccttgtgtcatacaccctactagaattttctgtgtgccaactacaggacatgcaaagagcagtgtggaacagttgaggcacagagcatctggtgagcttggaaagggggataaaacaagaaaatcaatgactaggcacaatgaagatgaagataaacatcttaggagattggggaatggatagtcttatcaaaagatagagacatcccactggtggaagaattgggcaaattctggtggcatcagttggaaggagcggaaggaaatggcaaaggtagcagctggagaaacatcctgggtaattagtttttttcactgaggggccactgaacctcttgctcatccttcactatttagagagcacttctaataaccaatgattgtctcacagcagcttcactggcgtggggagagctggaccttagcggctcctccacaatcaatggataaccacatggaaacactcctactctaaccaggctctgtgctggactccagtcctcatcactgagaggcgggcttccatgctgcagatgagaaaatgaagactcagagacgttcggtgacttactaaagttactgaatgcagaagtcaggatgcaaacctggattcatctagtgccaaaggccacattctttccatcatggaacacttttcttttactgagaaggcaggaagcctggtgaactctcactcagttctgatcatgcaggcagagggccatgttctccatataaaggggacagtgcctagagccacacagggtgttgagaggctgaaacagactttgggtggtgtggtgttgtgagaggctgcagagtgcagcaactggtgtcaggcagacctggacttgaatctcagctgggcaagtttttttgttttaaccccattcaaaaatgccagtccaactatttccctctgtaatcatgttttagctgctatacacattttaatgaaaattataatcgtactgtaggtttaagccttgattttctcacctgcaagctgataatgtctattataggattgtacatggggatgaaaacagttaacacaggaggagctccacaaagcacaggcatacagtaagcacccaatgcatatttttcactaggagaaggacctagaacaatgctgaggacattgttctaagacaatgctggggtgctcaggatgtggctgctaatgtttcactttttctggagcctgacagaatcctgggcactgtacccctaactgatatagtcaagagggtgtttcatgaacttatgaatttttataaggttctacttttgcaatttcatgtaatgctccagtgccgttggacacgtcagctcctgacctttcagttggtgaggcacttcccataaacagagccataaaagcccactggttttctccttggtgtgtgagtttgtttggtgctctccctttctccttcgccatttgaatagtgatgtcattattccaacgtcctctcacctctactgaaaaaggcctaccagtgactctctcctgggtactcagcaacactctggagggaagttgtggtttcagcaaggtgcaagcatcatgaaaccgagagagaactggcagggtggagaactcacccaaaggtaggagagagagaaaaacactcacatgcttttattaagcttcagacagtggtcaagtcagtctttattattaatttttttaagacttgctgttaagacattagcataacaccatttaaggaactataaatagaataaagcaccacccattccccacgaccaaatgctagcccaattatttccatttaaaagtgatcacttttaaatgctatacatattttaataaaaattataattatactataggtttaatttaatttaatctccttctctttccctgaatgttatttcaggaagggttttttttttgttttttttttttttttttgagatggagtcttgctccattgcccaggctggagtgcagtggtaccatcttggctcactgcaacctctgcctccctggttcaagcgattctcctgcctcagcctcccaagtagctgggattacaggtgtgtgccaccatgctcagctaagttttgtatttttagtagagacagagtttcgtcatgttggccaggctggtctcaaactcctggcctcaggtgatccgcctgccttagcctcccatagtgctgggattacaggcctgagccaccatgcccggcccaggaaggctttttcgacactgctgcttcttcttcctgcttatcacggaagctactgcatcatggcttgttcctgggactcagtgctccagcatcttggttgcaagcaatcccaggggtgaatggaacaggcagaggtatcagagtcacaaagccttgggttcaagccttgcttctgacacttactactcaaatgaccttggctcagttactgctttgtgctttgagcctattttctcatctgtgaagtgggaggtcacacagacgtggcagggttactgtgaggtttagaagtaaagcatgtaaaggcctggcagagaatttcttcagccaatggtagctgttcttagagatgtgctgttgttgaccttattgttggacagttctcgatgacgccatgatgggtatcttttataatgtctgttctttttttgacttctcttctgaggaaaagttccaggagtgggatttttagcccaagagtatagacatttttgtggcttttgacatgtattgccaatttgccttctagaaagctgatacgaattcacataatcattggcaatgtaattagtatttgatccaaagctagtagcaaaagtaggtgtgcaactagtgacgttagtaactcaggtcagtaataagtaggttctttaggaaccaagaggctgcagtttgtggaattttgatgttggaagccagaaatttgaagacagtaggaagtaatagaaattaggctgggcatagttgcagaccagcaaaaggcagatatttaccatctgtgagtttgttaacgcatatattccttcagggctcaagtatttgatattaaaacaggattcttcctaaatttatttctggtttaaaaccatatcagtgctatgatcttttcatttatattttatgttttctaacacatctcttgagtggggtggagagagcactgtgttgagaattgtttgatctggattcggggactgattctctcattacctcacagtgtaatttgggggaaaatcgctgcttattccccaaattcctatgccttccacagtgagactcactgctgtggcggccatgttcctggtgcctgatggtttacagcttttgagctttcaaaaaccagtcctgaagttctctgtgacaatacgccaaggggacttaataaaaaatttctgtatttaattaaattaattattattttttgataaggagtcttgctctattgctcaggctggggtgcagtggcacaatcttggctcactgcaacctctgcctccctggttcaagcgattctcctgcctcaccctcccgagtggctgggattactggtacctgccaccatgcccggctaatttttgtattttttagtagagacagggtttcgccatgttggtcaggctggtctcgagctcctgacctcaggtgatctgcccaccttggcctcccaaagtgctgggattacaggtgtgagccaccgtgccctgcccattgttgtattttaaatgcattaaaaataccctatggatatttgcaggccagtcctctcttctccttgctggaccttggtttccctggaaaccaaagggttgatttaggcaactgttgaggtccctccttctctgaaagtacccccaccccatgctaaggttgagggttactgtagctctgctgtgccggccactgctctgcttccactgtgcatttagggcctgtggattttgtagaactccactaagtttagctgctttctccttgtcaatcttcaagaaagtaaggattgggcccggcgcggtggctcacgcctgtaatcccaacactttgggaggccgaggtgggtggatcaggaggtcaggagatcaagaccatcctggctaatgcggtgaaaccccgtctctactaaaaatacaaaaacaaaattagccgggtgtggtggcgggtgcctgtagtcgcagctactcgggaggctgaggagggagaatggcatgaacccgggaggcggagcttgcagtgagccgagatcgtgccactgcactgcagcctgggcgacagagggagactctgtctcaaaaaaaaaaaaaaaaaaaaaaaaaattgaatatacagaattggagagcaacagaatttgagtggccccttcagagaatgtccttcttcatttttgctctctttcctagcctatttcaaagaactctttggggagttcggggtcagttttggtgtgcccatgacactggggagcagtgcagaccctgggcaccactcagctctaagcaggctcgggggatcccatctcagtttctcttgcaggaagtgactatggcctgagggccctagacactttacgggccacattcattgccagtgaaagaaaagtgcccagggcaatataattaaatgtagatgagattattactggaatagggttttttttttctctttaaaaataaaaacagcaggttggtggcatcagagaagtgtagtgaaggcgctctctagaacaacacaagctacaggtatgaaaatttataggcagatggccagcccctatcattgcaatttctccgtctttcaacgccataccaacaattcaggaattctcaacgtttctgggatggtttctccaagcaggtgggctcagagggaccagataggctgacatctgtgcaatgtaatctgatgaaatgacctgatgtagttatgctgcagtggcatttgtgggtacataagaagatggggttccccctgcccataaggaggtgtgacttaaggaggtggccttggcgtagttttgcttcagaactcaggaaaaaaaatgttggcattagtcactaaggagggaagtggctggaatgcaaagaaatatatcaggggggtccttttctgtggttcacacagggaaataatttgttcttccttttcctgtgcacctagaataatatgtatgaacaggcaaccctccaccataactgtagtgtattttcctgtagtcactaaagctgagctttgagagtctgggtgttcctttctaaaactttgttgttctttttaaactcaccatctccaacccccacattgccaatgttcataacacagtgtctggttgtattggacccttgctggtcaaacgtggtccatggaccagcagcactggcattatctgggagcttgttagaaatgcagaacgggcacatgctgggcacagtggctcacgcctgtaatcccagcagtttgaaaggctgaagcaggctgatcacctgaggtcaggagttcgagaccaggctggccaacatggcgaaacctcatctctactaaaaatataaaagttagctgggtgtggtggcggatgcctgtaatcccagctactcaggaggctgaggcaagagaatcacttgaatccaggaggcagaggttgcagtgagccgagatcgtgccactgcactccagactgggcaacagagagagactctgtctcaaaaaaaaaaaaaaaaaaaaaaaacccagaaccccaggcacccaagatgtatatgtagggatgtgctcgtacttcagcctcttgagtagctgggacaagcggcatgggccaccaagcctggcttatttttttatcttttgtagagatggggtctccctatgttgcccaggctggtctcaaaatcctgggctcaagcaatcctcccacctcggcctctctaagtgctgggattataggcatgcaccactatacctggactataaaaatttgttaaaagagtaattttggtgggtttaaaaataagatgaaactaaattactaggacacagtagacatttgacaagggcaaattaaagtgtcctaaggttttatattttgggaaaagtcattagagatattgattaactttagactaattaggacaagtatttatatgaaaaatttaagggttcccactaaaagagtagaaatggaacgtaaaattttcaaaccaacgaagaagaataatgtgatcaattggtagaatgcaaaaaataaaaataaaaagaggagaaaagaagtaaagataaaaagaaaacacaaaataaaatggtagaagtaaattcacaaatatcattaaccataatgattctaattggaggaaacttaaaatttctgaacacgcgcttgatgccaggtactatgctgtgcccaatacaaaaatagataaacaaaagcttctgtcttcaaaagcttatagtccagtagtgggtggggcagggctgagaatgaggctaagcaaagcaatacctcattctattgtgcttcttgtatactgagtcattttttttttaaacaaatgcacggtttttggcaaccctgcattgagcaatgctattggtgccaattttccaacagcatatgctcattttttgtctcagggtcacattttggtaatgcttgcaatatttctaactttttcatattattatatatattatgttgatctgtgatcggtgatctttgatgttaactattgtcattgttttggggcaccacaaacctcaccatataggatagcaaacttaatcgataaatatgtgtgttctgattcctccaccgaccaggtgtccccccatctctctcccactcctcgggccaccctattccctgggacacaatatattgaaatcaggccaactaataatccctgcagtggcctcaaagtgttcaagtgaaaggaagagttgcacatctctctttttaaatcaaaagctagaaacgcttaagcttagtgaggaaggcatgtgaaagccgagctagactgaaagctaggcctcttgcaccaaacagatagctgagttgtgaaggcaaagaaaagttcttgaaggaaatggaaagtgctactccagtggacacatgcatgattagaaagggaaacagctttattgctgatatgcagaaagcttgggtgatggcaatagagaatcaaaccagccactatattcccttaagccaaagacttagccagggccagagaaaggcccttattctcttcaaatttatgaaggcagagagaggtgaggaggctgcaaaatattttcttttaagctagcagaggttggttgatgagatttaaggaaagaaatcatctctataacataaaagtgcaagagaagcagtaagtgctgatgtagaagctgaagcaagttatccaggatatttagctaagatcgctgaggaaggcggctacactaagcaacagattttcggtgtagaccaagcagccttctattagaagaagatgctacctgggactttcatagctagaaagaagtcaatacctggcctcaaagcttcaaaggacaggctgactctcttgttagaggctaatggagttggtgactttaagttgaagccaatgctcattgactctttttttttctttctttcttttttttttttttgtgacagagtctcactctgttgcccaggctggagtgtagcggtgcaatctcggctcactgcaacctctgccacccaggttcaagcaattctcctgcctcaggctcctgagtagctgggattacaggcccctgccaccacgcccgggtaattttttgtagttcttagtagagacggggtttcaccaccttggccaggctggtcttgaactccagacctcatgatccacccaccttggcctcccaaagtgctgggattacaggcatgagcattcgagctcactgactgtttcaaaagtcctaggacttttaagaaatatgctaaccctactctgcttgtgctctagaaatggaataacaaagcctgatgacaggacatctgtttacagcatggtttactgaatattttaagcccactgttgaaaactactgctcagaaaaaaagatccctttcaaaatattactgctcattgacaacgcacctggttacccaataacgctaatggagatgtacgaggagatgaatgttgttttcatgcctgctaatacaacatccattctgtagtctgtggatcaaggagtaattttgactctcaaatcttattatttaagaaatacattcataaggctatacagccatagatagtggtttctctgatggatctgggcaaagtaaattgaaaaccttctggaaaggattcatcgttctagatgtcattaagaacatttatgattcataggtcagggtcaagatatcaacattaacaagaatttggaagaagttgattccaacccttatgcatgacttcagtgggggaagtcactgcagatgtggtgaaaatagcaagagaaccagaattagaaatggagcctgttccctcctccctgcttctaaaaaaacagtggagcctgaagatgcgactgaattgctgcaatctcatgatatatatgatactatcttctcaatatatatgatactatcttctcaatttattacaaattgtaataaacataataatcaaactggtgctccaagcttatgctgttcacatggaagacaccgcaaaagaagacacaatagagactgccttgcaattgtaccttgcaataagaggtacgaattgtttctatagagatggagaaataaaaggacaaatctagttgcctaaaagacaattctctgtacacattttatttacagtttttacattgtcttaatacggattggattgctttttctacttgagcctttttaaccaaaacaaaataacctaagtaatacaaagtgttaaaatgcagcataaaaggtagtttttttttttctaattctgtgaagaatgtcaatggtcatttaatgggaatagcattgaatctataaattactttgggcagtatggccattttcacgatattgattctgcctatccatgagcatagaatgtttttccatttctttgtgtcctctgtgatttccttgagcagtggtttgtagttctccttgaagaggtccttcacttcccttgttaattgcattcttaagtattttattctctttgtagcaattgtgaatgagagttctttcatgatttggctctctgcttgtttattcttggtgtataggcatgcttgtgatttttgcacattgattttttatcctaagatttcactgaagttgcttatcagcttgagagcttttgggctaagaagatggggttttctagatataggatcatgtcatctgtgaacagagacagtttgacttcctcttttcctattcaaatacgctttctttctttcttttgcctgattgccctggctagaactcccaatactatgttgaataggagggtgagagagggcatccttgtcttgtgctggttttcaaggagaatgcttccaacttttgcccattcagtatgatattggctgtgggtttgtcataaatggttcttattgtcttgatgtatgtcccatcaatacgtagcttattgagagtttttaacactaagggatgttgaattttatggaaggccttttctgtatctattgagataatcatgtggtttttgtctttagttctgtttatgtgatgaattatgtttattgatttgcatatgttgaaccagccttgcatcctagggatgaagctgacttgatcgtggtggataaactttttgatgtgctgctggattcggcttgccagtattttattgaggatttttgcatcaatgtttatgagggatattggcctgaagttttctttttttgttgtatctctgccaggttttggtatcagaatggcactggcctcataaaataagtttgagaggagtccctccttttcaattgtttggaatagtttcagaagaaatggtaccagctcctctttgtacctctggtagaattcagctgtaaatccgtctggtcctgggctttttttggttggtagtctattaattattgcctcaatttcagaacttgttattggtctattcagggattcaacttcttcctggttcagtcttgggagagtgtatgtgtccaggaacttatccatttcttgtagattttctagtttatttgcatagtggtgttcttaatattatctgatggttgtatttctgtggggtcagtggtgatatcccctctatcatttttttttgtgtctatttgattcttctctcttttcttctttattagtctagctagcaggttttttttttttcccctcaaaaaatcagctcctagatttgtagattttttgaagggtttttttatatctctatctccttcagttctgctctgatcttggttatttcttgtcttctgccagctttggggtttgtttgctcttggctctctagttcttttagctgtgatgttagattgtcaatttgagatctttctacctttttgtgttatagcatttagtgctataaatttctctgttaacactgctttagctgcatcccagagattctggcatgttatctctttgttctcgttggtttcaaagaacttcttgatttctgccttaatttcattatttacccgggtatcattcaggagcaggctgttcaatttccatgtagttgtgtggttttgagtgagcttcttaatcttcagttctaatttgattgtgctgtggtctgagagactgtttgttatgatttcagctctcttgcatttgctgaggagtgttttacttccaactatgtgatcgattttatagtaagtgccatgtggtgccaagaatgtatattctgttgcttttgggtgaagagttctgtagatatctgtcaggtccacttgatcagagctgagttcaagtcctgaatattttgttaattttctgtcttgatgatctgtctaatattggcagtgaggtgttaaggtctcccactattattgtgtgggagtctaagcaaaaattgacaaatgggatctaattaaactaaagggcttctgcatagcaaaagaaactatcatcagagtgaacagacaacctatagaatgggagaaaatttttgcaatctatccatttgacaaaggtctaatattccgaatctacaagaaacttaagtttacaagaaaaaaacaaccccattaacaagtgagcaaaggacatgaacagacacttcccaaaagaaggcatttatatggccaacaaacataaaaataaagggtcaacattactgatcattagagaaatgcaaatcaaaaccacagtgagataccatctcacgccagccagaatggcgattattaaaaagtcaagaaacagtagatgctggtgaggctgtggagaaataggaacacttttacactgttggtggaaatgtaaattagttcaaccattgtggaagacagtatggcaattcctcaaagacctagaaccagaaatgccgtttgacccagcaatcccattacttggtatgtacccaaacgaatataaatcattcgattacaaagatacatgcacacatatgtccattgcagcactattcacaatagcaaagatgtgtaaccaacccagtggtagaccggataaagaaaatgtggtacatatacaccatggaatatcatgcagccataagaaggaatgagatcatgtcctttgcagtggcatggatggagccggaagccattatcctcagcaaactaacacaggaacgaaaaaccaaacactgcatatttccacttataagttggaggtgaacagtgagaacacatggacataggaaggggaacaacacacactggggcctgttcgggggtgggggagggagagaatcaggaaaaatagctaatgcatgcagggcttaatacttaggtgatggtttgataggtgtagcaaaccaccatggcacacatttatgtatgcaacaaacctgcacatcctgcacatgtattacggaacttaaaataaaataaaataaaaaatatagcataaagatacaaaactagacatactaattctagttagaaatgtaattatgatgttacatttttatgatcaacaattatgttgtggaaattatacaaacacacatcactgacttgaatgaaatgcataaaattgtagcaaagctttgtagttacaaaaaacaaaaaaaaattaccaaagaaagcacaagtttttggaggggaggggttttttttcctttcttttttttttaaattatactttaagttttagggtgcatgtgcacaatgtgcaggtttgttacatatgtatacatgtgccatgttggtgtgctgcaccaattaactcgtcatttaacattacgtatatctcctaatgctatccctcccccatcccccaaccccatgacaggccccggtgtgtgatgttccccttcctgtgtccaagtgttctcattgttcaattcccacctatgagtgagaacatgcggtgtttggttttttgtccgtgagatagtttgctgagaatgatgttttccagcttcatccatgtccctacaaaggacatgaactcatcattttttatggctgcatagtattccatggtgtatatgtgccacattttcttaatccagtctatcattgttggacatttgggttggttccaagtctttgctattgtgaatagtgccgcaataaacatacgtgtgcatgggtcccaaagaatgcacaaaattaatgtctattccacctttgtgtcatattcctggattctcatgatataactttgacagatgaggagttggttcttacagatgagcaaagaaagtagttttttgagatggaatccactcctggtgaagatgccgtgaacgttgttgaaatgacaacaaaggattgagaatatcacataaacgtagttgataaagtggtggcaggatttgagagaactgactccaattttgaaagaacttctattgtggacaaaatgctaccaaaaagcactgcatgctacagagaaatcttttgtaaaaagaaaagtccatctatgtcacaaacttcattgtcttatttttttttaattgccacggcaacctcaatcttcagcaaccaccaccctgatcagtcagcatccatcaacagtgaagcaagaccctctacttgcgaaaagattactactcactgagggctcagatgattgctaccatttttttttttagcaacaaagtattttaaaattaaggtatgtactttttaaaagatgtgatgctatggtacacttaatagactacagtatagtgtgaccacaactcttcgatgcactgggaaaccaaaacatttgtgtgacccactgtgttgccatatttgctttattgcagtggtctggaactgaacccacgatatctccaaaatatgcctgtaaaaacagtaggctaagtgttatgataaaggaaatacagagtgctatgggactaaaagaaggggcatctagcttagcctgttgggagagggtcagggaaagctttctgaagatggtgacccctcagctgcactttggaggatgagtgagaagacaaaaggggtaggaagggtgtaccaggcaaatgtaacagcacgtgcaaatgcacagaattgtaagagaacatggcacgttctggtccgacattgttccattatggatgagaaacttgaagcccagaaaaggtgaggagactaccccaaggtcacccagtgaattagtagtaggatcagaatttgcaccaagacttgcgtttccttttacattggattttccactataccacagtgccttaggtttgtagcaggggattctgtgactagaggttgttgagactgcagccaactttgaaaatgagctgcatgtgggtgtgggggctggatctgtctccggcccatccctggctggagctgagccaggaacttggcagtttccagggctgagccatccagctcaccccaaggaagcctcggcctccagccatggcactaccacgtggtttaatcattaactccaagttcacagggctgaagctggaatgcacaggacctggggagcagaccgggtctccagggagctaagagaaagttggcttttgagatgggaggggaccaaagtttagaatggggtttttcatccctgaatggatctatgttctgggctcaggaacaagggcactcgctgttactctcaattttgttggagtttacacatgttgttagcttgatttcaggatttcctttcaacgttcatagcagattgtgtttccctctgccacatccctcagcctgcattcatctaccccactaaactgtgatgttcccctcggagggcaggactcagtgcttggaacaatctggtgcatagttggtgctcattaaatataggctgattgattgaataaatgaggccctaactctgcctaaaggcatcccaaagcacatgctttttaaaaaaaaaaaattaaaagacatagaaacctggctgggagtagtggctcatgcctgtaatcccagcacttttggaagctgagacaaaagaatcacttgagcccagggttcaagaccaacctggataacaaagtaagactccgtctcttatgaaaataaaaatgaaaaaaaaaaaagaaatgataactgattttgctttaaaagttcaacagagattcgcaaaaatccccagagatattctgtgctatcataaaatagtctagcaccatgatgaggtccactgttgtagaagagatggactgctttttttttttaataatttcaacttttattttagattcaggggtacatgtgcaggtttgttgtctgggtatattgtacgacaacgaggtttggggtatcaatgatcctatcacccaagtagtgagcatagtacccaataggtagtttttcggcccttgccctcctccctccctctccccttttggagtccccagtgtctgctgttctcatctttgtgtctgtatgtacccagtggtcagctcccacttataagtgagaacatgtagtatttggttttctgttcctgcattaattcctttgagataatggcctccagctacatccatgttgccgcaaaggatgtgatttcattcttttttattgctgcatagtattctatggtgtatatgtaccacatttgcttcatccaatccaccgtggatgggcatctaggtgactccgtgtctttgctattatggtatttttggtagaacgatttattttcctctgggtagatacccagtcatgggattgctgggtcaagtgatagttctgctggggatgttcttaaggagtcagtgtgtggatgactgcagagtttgtgaggttgctttggcattcttgggagaggggggctattcagatatgaggccatgttttattgaggaaacaaaagcccagtggaggtcaaattccaccagcataataaaggtaactgcctcttttgatttctgaaagctgtaacctgcaattggaaagactgcattatcagtagcattgctaagccctgaaaatgcacctttaaagggatttctggattccacataacaaaacttcccctggaaggtgaggtgcaggtggcagtaaaatttctgttcttttttggtgaacccaagtttcctgatctcgaaagtagagacagtcatctcttcttcacaacgtactggtaatggttaaatggaatgacagtatataacgtccttggcacccaggagatgtcagtcccagtgaaaattatcttctgtctcttaaaagtaaaaatcctgaaccgatatacacagccagagatgtggagatacattttgctcttagatgccatgtgtgtggtgcccagtgattcggagaccaatctggaagggaaagaatcactctgctgaatgctggcttaaagtgtaaatgtgtgccgatagtgttgctatagccagcactagagcatactgggagaagaaacttcccttgcaagaatagtcactctcctggaaagtgactattggttggaattgagccataaaggctgccgactctcaccctagcaaattctgtgtcagcccaaggtcctggacattctgggcaaactggccaatgtcagggagctctttctgtaccagcctctgggtcctttttttaatttgtgggtaagtgacctatcatacagccagtttgcatttacctctgtctaccacctgtagttgtcagggttctgtaagttctttaaagttctagcactcagtgatgattatgtcaggggaaaaaattcaggaaggacctcaggcttaggttcctccaacttcccacctgcccttggtctcagcaacaatggagaacaaattgcctttgcaaggaattggaagatgctgagctgctctggccacctgatctctttttcccttccctttatcatttctctcctttgccctaaaacctgagatgaaatgagaagtaaattgccaagggagatcctctcctggggcaaatttcctgtccttgcttatgggcacagagaccctgagtgggaaggccagttgcagggcactctcccagaaccagccctggggtgacaggtgcaggcaggatccacgctttcatgggggaggggaagggttgcaaaagaggaggaggaagaaagactgtgggagaccccaagggctgcccctatttctctactccaccccaacctgaaacttactgtcggtctccaccaagcctgagagagagagagagagagagagagagaaagagggagtggggagaaagagacagggagggggaaatcaaagaaaattgcaaaagtcaatggcctggaactagaggcagcctcagcaactgcagtgtgactttgattcccctatcataaccctgaattaaaaattcaggcaattatctgcatggcttccttctgattagaacgagccggagcctcattaatgcatcagcacagaggaaagccattagggtctgtgaaatggaatgtttctctgagaacaggttccgcttgatgtagaatacccagcaaaaagaaatttcacacatttttgagctcagagtcacaggacggcacccagcttcagggctgcagaccccgccaccacagtcggcacctctcagctggctctgggtgaaagccacctttgtttcgcagcctctctctggcacctccatccactgcattgtgtggagggaggctgaaggagctgaggggctgaggggcttgctgggtcctgagacactgagtcagccttcagccaggatccccagtttcaaaggctttgagccacagggagcacgggaacttcacaggaacactgccctcctctgctagaagaactagaatagaagcaccgtcgaggacagtgaaggtcctagactccagaaaaggtcaaagtatcttcatggcccccgcaattctcggtactttcttcacccacgtggtaatttggtcatcccaagatggccaaagcaggatctggtgaagcccagtcagccttggaaggttgttgcttaagagagggtgaaggattggagggcatcttttattcatggtccagggtaccctgtatccatcccttattctataagctcggagcttccagaaatgcaaatctatggcccaatttctaagtgggtgaatatccctacaatatttggcatttggaaactctcatgcaccccactttgggacttctataggggcagctttcttccctaaatgactatattgcttatggggaaacccaagagtgctgttccagacaagtacctttgcagccctagtaagttcatctcttgggagagttgggttcaacttgactttgtctaaattttcttctagttggtgggtaggacttgggtttcctcatttcagacatcttgacatttctccaatatggtgattctcaggacaccaaacattaatccttaggatgaacaacaaataatctctttaggagaaaagtcaatgttatatgggaagaactgaaaaaggtgaaaaagtttctgtaggaagagaactagttaagagttgataggatgccaaccaagaaaatgatatccttcaaacggtttgactaagccacgttcttctcctggcacacctgttaactcttcagtgttaagaaccagggctaaatgtccgggtaaagctgtgaacagggcgcatccgtggttagtgcaatggagtccatgtagtactgatggaatttgtatcaacagcgccccctactgcatatgagcaaaactggacaacccaatagtaatttgttttcgaaagtgttttcagccaatcccacgttagaaggatacattcctggtcatcagggagtttttatgaagcatgttttcaatactgcagacagttttatgggtgaaggctcctagagtttatctcactctctaacacaaacaagatgcttggtgattcaaccatgctatttgtgggctgtgagcatccatctctctaacacttagctgacaaagtcagacgtactcgagaattacttgtgacttcagatgatcccatgtaaagcgctaacctaaaggcaccccgagtcttgaggaggtggggttatctatctcggctcatgttggtaggggagtgaaaagagctggccaaaggtcgggaatgtgggccttccagggagagaagctactccaccagctcaacagaaaaggcctcctttctgccatcggaaatggtcaaatcccagccgttagtactgtagcaccattcactaattccttgatattttaaacatagatgctcttcccaggcaaatcattcctttcttcccgagatcactcagctacgtttgcaatttgtcactctatattcacatgacaaacatttttcaagcaattatgatatgccagacattgtttagaacaggagtgacagcaccgagcagatggcaaatgaagaattccctgttctttggagcatacatgctagttgggggtacagatgacaaacagaaagacaagcaagggtgtcagagctgtaaatgcggtgatatacaatgctgggcaagcgggcagagagtgatggggggctactttgcacaggtggtcaggggaagcctctctgaagagcacgttaggaaatctttctaatgctccctgccaagcgatcttctttctctcttttaaaactagaattgcctctcccgttaaacattcccagttaactctccctgtcctttgactttccactcagctcatcatctctgctcaagcttcttcatcttgcaaagagacaggatcataatctccttgaggacaagggcccatcttctgcttctttggcttgctaccagagtggagaggaggggaacaaacattgctactatatgctagaaacatgaacgctttagttcattgactcccctcaaaactcctgccatctctttattatttgtccattttataaatgaggataatgaggctcggtttattcaagggtgtgagctgtcgaggggtggaactgggatttgaaccctgttctagcctcatggcctgcagtcttcccactcctaagcatggcatagggtgagtgttcattaaatgttgtcaatgagtcatgagcacaaggaagggatgagctttgtttctcagagagcagtcctgcaaaggaaatgattagactcccaccagctggcttataaattcttcttttacccactaagtgaccatgagccgttcattttcctcttcctgggctttgtaattcttctctgtgaactaaggttagaccagatgatcccccaggtctcttccagctctgacagtctaaggaatgtaatcttttgtaagcagtaggggtgggtggtgaatggggaggagtcaggtgacttctttacatcaaagatctgaatctgaatttgtattaagacagaacaaaacacaacagtttgtttcttcagttaaaattcaaagcctgggcaacatagtgagatcccatctctagagaaaatttttaaaaattagccaggtgtggcggtgtgtgcctgttttcctagctactcaggaggctgaggtgggaggatcgcttgagtcaaggacttcaaggctgcagtgagctatggttgtgtcactgcactccagtctggctgacagagcgaggccctgtctctaaaataaataaaaacaataaatcaacatgtactgaatatctactgtgtactgggccctggtatgtgctgaatcagatgcggagataaatttttaaaacgttatcttcaccctgaaacatgtgtaatgagaaagacaaatatgacaacaacaataaatgataataatcataataataacagctaacaatgtacatggcactccctctttgccagaaactgttctgagcacttcatactctgtaactgattttaatcttcccaaccattgtacgaggtgggcactatcattattcctactttacaagtgagtaaattgaggcacaaagggggatttgtcaaaagggcatggtgagcattagtagtgcatgaaaagtgtttacctatggggcccgaaatgtagaaatcataacaggcaggtgtttgaagtgaaaggatcttgtgcagtgttaactggtgggttcgttcccctgtcttttctctattccctgcttgacccttctgctacttaggatcagccacacacacccagtgggagggaagggattttctgtagcgagcagagaatgctttagggtttggaaacttaaaatccatggctgtgagatgacccaggacctagaaaaaagtgggtgagttagaaccagttttcccaccaccagggaaagaggagagtaagaagagaaatgaggcatgcgtagatcttcctgagaaaggcagttatgacaccctgttccccatttgagctagatgttcagagttctggggatcaggccccagagcagaaatggcccgtgtgcatggttgatgtgccagcctgaaatggccctgggcatgatgagtgagcggatgtgcctggggtttagaagtgctttgagtttgtgagcaggtggaagtagaaggggtccgagccagcacggtgcagacagcagaatgcatgtccaccttcctaggagaagagtggaagtaaacagtcacagggcccgaagggtcccctagaatgagagcaaggaaaaaagcagcctggaggaaataatgcctcaggaccaggacagggagtggatgcctcacggctgctgcaagaaacagtggagtgaagaggccagaatggaagttccttgaggcagggattcctttctgtttaggctccatactgtgggcctaggtcagataataggtgatccgtcaatatttgttaaatgaatgaccttaggtgtgctacctctggaatcaggcctttggttttaaatctcagctctgcctcttcctagccaagtaatccttttgtaagccccttaccttctctgtgcctcatctataaaatgtgggtaaaaatcatacggatcactactgatccaagatatcaaaagatggaacacagatgaagcttttagtgtctggcacagcggaagtgctcactaagtatttgctcctggtctcatgagatgccactgcccccgccttcttgccttacaccttggcattacactaagtactccctctcctgacccctcctaacttcgatattaaccctgaagaaaagatggggactccagaataggctaagatcaagcttccgccaccacaatacaatggagactcctggcagaacttaagctaagagctttaaaaaaagttaaacttcttgcacagctgatgttgcaggctcattttcatattcaagaatagctcaaacctttgaaaagtaggcatccctaggaggccctttctagcattttaagttgaacagttttctcccacataggcgtgtgtacacagagaacaactgacctctcaccttactcgcctttctagaaaagcacagttatccgaggagttatcttttgcaggtgctgctagataaaactcaactttaaggcaaagaggccaagtctaggaaacaggtctctgtccttcctttcccttactgtatcctcatgaaagacccctgggctttcctgaggaaattcagcacacacagttttatttcatattaagatatgtcctcctgaaggtgagtgataaatgtgatcattaattttttattgaaaaaaataatctggatttacctggcttctcagttatctaaatggcaattggatgaccaaccttcctatttgcctgagagtggcctcattttagcactgaaacccctcagccctggacaaacaaagacgacgatctaaatgtccttgacaaaccctaaatgccggtgacatctcaggtagacttgttggcccaagggagtgtttggagatttttgttttggatggaaaaggaaatgtactcctttggaatcagaagagctcaccatctaggaacgaaatatgacatgaattcctcccagtgcattctgtactctgctcaggattggcaagcctggccccaaagaccctgcagagggagatacctggaaatgcctcatttgacaaggaggcaatgggagggcagagaggaggagactgctgtaaataggtccatgtggcaagtctgtaaactctgtcttcacatctttcccatagagtcccttgattttggtcagactctagacccccatgacaaacccctgctgcctgcacagggtgggcctgtgtcccctcctttaccaagtcaacctacctgtgtgggacactgtgatttgctcccaggcaaaggagcagcccctggcatagagactccccccaggacacacggaccggctgccaagcctgtacgacattttagtggcattttcaaaccacatggagtaggctcactgaatgcctagtgaatttccagtcacagagaatgcagcacagcctgttctgcacctcgtgggctgctgcgagagctcagccgggctgcagacacttggtgcttcagggttggattcggaggctgcagagctccttgcatgggtgggtccctgggcagctggcctctctgcatggctgggatggagcctctcagccaccacactcctcaccccggtgccagtgcctctgcctggccacagcagcaaagaatatccctcagcctctcctttcttgagagctatagggaggattccttttagacacgtgggacggaaaaacttccttaactctcagaaatggatttcttctttcccaagggcacgatagacaaggctggccaaataatttgtgggctcagtgcaaaatgaaaatgtggggccctgggaagtcaatgtcccctttccatgcacttgctgccccacccacggtggacaggtgacccccagggactgcaagctctgtgctggggcatgattggtaccaggatccggggtggacacgagacctctgccaagtttgcagccaaaggtgacctgccactctgcatggctgggatggagcctctcagccacactcttcaccccggtgccagtgcctctgcctggccacagcagcaaagaatatccctcagtctctcctttcctgagagctgtagggaggattccttttagacacgtggggcacttccaaccagaggtggggacgaccaccaccttgtcctgcaccaacacacaatggggcacacacctcttatcctacccacatctatgcccaggtccctgtggcagggcagagagtgatggcagggtggtggcctccctctgctgatacctccctgggtggagggtggtggctgttgtagagcaggcaagggaaggggaggcggggccagcgtagcccaccaggggacaggaaggtgacaggcagcaggcagcaggaacagactgtgagcagaggctccaaatccccattatatgctccattgggatgtcagatttcacttacaaaacacaaattcaaggataaaatactgaagaatttcaaaatggcaacctcagggcactactcccaagtatggggccctttggagtacagggccttgtgcaacttcactggctgctgacacatgaagctggccctgacagtgggaatttgcttcctgtgcttcctctgggaagctcagagccaaaatgaatggcttgttttgaataactgtggaggacctggagcttgcatagcacattccaacttggctctagtcttgatcttcagattgttcaacattctgcttttgacttttgtttttcattgtcttatttatatgctaaaaggatgtaatattataaaaagtttcaaatcctttgtcaagtgagagagataacaaaaaatgagatattttccttcttaaccttcgcttgggtcctcaatgtaaagagatcattttggtgatgggagggcagctggaaaatctgcaccaccacagctaatctgattaattgagaggatatttgcaaatgcacattaaaatacaatattgatccacccttggtaaaaacgtgtataaattgttttccagtagtgatggatttgcagggagccaattgcaccctcccaatccatctcccatgtaaacattttagaaacacctagccagcatctccattacaacaacattaagcagttcccatattaattatctattgctgcataacaaattacccccaaacttagcagctaaaaacatttattatctcatagtatctgagggtcaggaatccaggatcaggtttgcaatgagtggtctctcatgagattgcagtcacgatgttggttgggctacagtcatctgaaggctagattggggttggagatttgagatgatggacttacaaagctgttggccagaggtctcagttcctcaccatgtggacctctccataggctgcgtgagtgtcctcatgacatgatagttagcatgacctggaaagagtagtccaagaaagagagaactagaaggaagccccagcatctttcaagatccaatctcttgccatcatcctcaatattctatttgctcaaagcaagtcattaagtccagcctgcccacaatgggagcggagttagggatgacctcttggaggaaagagtaccaaataatttgtggacgtattttaaaaccacagtttcccgaaacattaagtggctggaccataaatgaatttccacaaaggttggttctagtaatcacacagtaggaaaagcttggactgtgggtcacatctgagtttgaaaccaagacttgctcctgactagtctgtgggatctggacaaaatgatcatctccgaaccttagtttcttcatctgtaaaatgaagataataatagtaattctttcatagagttattatgctaataatatctaaatgagatggccctgcagggttggatccaacctgaggcttttacagtttgatggggctttctttaaggaaacaggatggaaaattataataagttaggtacaaaatgagcatttatttacaattagaattgacaagaattatatattttaaaagccaacaaatagcataaatatcacaaatccaagaaaaaattaactacctgaacaaagctctttcaaatactttctttccgatgaaatcatatcctttgcagtgacatggatgcagctggatgccataatcctaaacaaattaatgcagaaacagaaaaccaaatcctgcgtgttcttacttataagtgggagttaaacaatgggtgtgcatgaacgtaatgatggaaacaatagacactggggactccaaaatgggggaggaaggacgggagggtgggtagaaaaactatctattgggcactacgttcactatttgggtggggttcaagagaagcccaaacgccagcattacacaatatatctttgtaacaaacctgcacacatacccccaaatctaaaattgaaatacttgtccgggcacggtggctcacgcctataatcccagcactttgggaggccgaggcgggtggatcacgagatcaggagatcgagaccatcctggctaacatggtgaaaaccccgtctctactaaaaatacaaaaaattagccgggcgtggtggcgggcgcctgtagtcccagctactagagaggctgaggcgggagaatggtgtgaacccgggaggcggagcttgcagtgacccaagattgtgccactgtactccagtctgggggacagagcgagactccgtctcaaaaataaataaataaataaataaataaataaataataaaataaaattgaaatactttctttcctacgttttgactaaatgctgtttgatcactccctacaatgacaaagattttgtaatattgtccatagccagaagagaagtataattcagtcttttaatagcacggttcatcaaaagttggttttgattactgggagcttattattcagcgccactaatcattatttgtaatgtcatgcacatttttaggattgttgtcaaatttgggaaaacctctctgaggtttcttttatttatgagctcagggtatttcaggtgttcttgtgtagtcaattggtggcactcattaaccggggccacaggaggggcttgacgcttcagcttctctgtaaatcctctcctggaagcaggtcagtgtgtgtagggacctggcctgcagtaggtgcacaggaagtggaggaagcctggagacaaccttcatcttcctgctccattgcctcaggtggagtaggggatttcccaccctggactcagcttcctctttctccagtagcccatcagggcctgtgagaaggtggtgataaaaatacaccatagcagggtgcggtggctcacgcctgtaatcccagcactttgggaggccgaggagggcgttccatggggtcaggagtttgagaccagcctggacaacatggtgaaaccccgtctctactaaaaatacaaaaaattacccaggtgtggtggtgggcgcctgtaatctcagctactcgggaggctgaggcaggagaatcgcgtgaacctgggaggtggaggttgcagtgagccaagatcacgccattgcactccatccagctcaggcaacagtgcgagactccatctcaaaacaacagcagcaacaacaaaaaaaaaacaagaaacactgcttgttatgatgcagtggaaagaaccctggactcagaattaaaaaacctgggtgtgagtcctgtctttgtcacttatcagctgtgtgacttttggcaaattacccaaactctctgtgtcttcgtttcctcatctctgagatgggtgaacctgtgccagcctcatggttgtagagatgaaaggcaggatataagtaaaggggctttgtaaattctaaagcaattttactaatgtaaatgatttttattttggtacctggaagagttactgaggaatcagatgggttactatccaatgcctatgagcatcttaaggtctttgttgtctgtggcctaaagcaatgggaaattcaagttggactttaatcaaaaggatggcaaaattgccaatgatttccacaaaaatgtactgagccccatctgttggccatagtttgtgctagagatggggatttaaagacagatgagacacagttctggcccttcagggaaggtagtgctggtagatggaactccagaagggcatctggagggtggatttagcccctgagccttctaactttataatctgggcctccctgcacctccgtgtctccttctgcaaaggggcggtgcgctctctgtgtgagcaggtgtggaaacaagtgagttaaagctggcagatcttggaggaaacaagtgagttaaagctggtagatcttgtaggatgcttggacaggtgtctgacaaagccatcagagggttgaagccatctgagactggctgttctccttggggaattttcaggcagctttgaagtgccgccaggacaagggaggccaccccatcctggaggtgcattcacttgtaatttactcctccacgtgggctctggaactccactctcataaatacatcacccactctggctcgccctgagtaaaggcaggctgacaggagaaggggggccggaggggaggaatcactaaattaagaaggtccctgggggtgggtggcctacagacacgattgagactcctgagtctctccccttagagcataaatatttccaactaagatcacagactccctgatcataaaatcaatgaaaccacaagggaaaatgatctcctgcatgactgccccagagatatctcagagtcctttcccctcctgcagaagcgattgttccggggctcaggatttgaaatccaggcaagactgttgagaatttgatggagagagaacatcagttgggttgggtgcaggactatcctgttctactgcagaatttagaacagaagctatgttctgctatgggtctgtgcaacacctactgcaacatgagaatttttctgaaagtcagaagacctgagttcaagctctagcccttctaattactggctgagtgtcccttggcagtagactctctaagcccagtttcctcatctattaaaagaaggataataacgcaaggtctgcctgccatatttgggaggtaacaacatcaaaagaggtctgtctatgcaaatgttttgtaaactataaagctcttgataaataacatgttttattattaaaagataaaaagcaccaattctgctagtgaacctatgagaactccttatgctatgacagaagctgtggcttaaacgaggggatattctgacttacatgattgagaagggctaaggtgggactgattcagagaagactagattcaaacaatgtcaccaaggccagcctctccccctctccttgctctgccttctgtggtattagatttggcttcatcatccagtttcatgggtctttgtggtcacaaatgtccacagtgactgcaagtcacatgtcttcacacgatgccatccaggggaagagaggtctctttccagtaacttctgctgaagacagatggagagaggaatgagaaactcttctttttccagacttagtacatgtatcaaatttcactggctttctttatataggtgggggcatgtcaattgccttaagagaatcaaggcccatccctcgatttttgcataggactgggatgccaacccaaccacatttggaagaggctattttatcagaagactgagtggaggctgggttgcaaaaacaacatatgtctagtacagtctaccccctctagctgcccaaaagccacacttacctctatctccataaacatgccttcaaaaatatccaccctccacaccaaacccaatcaacctctttccctcaaagagacaagccatgattttatccagttctggttctctgggtgatgtgtggtcctcatacatggatctcttattggtctcctgtggtccactaaggttaagtggtaaatttaatcagcactcagtagacagtggtagagagagaacagggaaattgcagtaataactctcctttggaaaacgaaagaataggaaacaactcctagtggtcactggcccatagcccatatctgactctgccagaaatcacatggacttggtctcctgggagcaaataagtgacttcccccagctctgccctctgcaaggcttccctttgcctgttggcttctggggcccctgcttgtctgtctgggaaaatctgtcctgtggattgtccttcatgggaccctgtgacatgcacattgaggaggggtacccctttctgggagctgctctgtttcagcagctctctctctgttgatgtgagtttggaagcctggaattcactatcctaggccattataggccaggcttgaggattatttggcaaaatgacacccttaaaaagttaacaaggtcctggtctatttgctcctggctaatgccatggagagtacccagagtcagagatcttatcatgtcatactttttgaaacaaaacactccctgggaatatcaacctcctagcatggggcccagtgctctggccatcccctgatcccttcaatttgatgcttctgtcttggcctcaactggagaaaagccaaaataatagggtgggtggggaggactcaaactactcattcctcataataacaacaaaaatattaggagtaacgtgtattgattgcttactacggggcaggcactgttctaaagtctttatatgtattattaactcacttaatcttcataagcagccctgtgagacaggaactgttaccatgcacaatttgggaaaactattcatggagcaataaagtaacctgctagtaagaggcagagtggggattcaaccccagggggcctgggcccgcagtcctcgtggagcaataatccctgttgtgtgctgctatcgggctgcatcctgctgcatcttcccaagggcagtgttgacttctttgttcaaggcataataggaggtgcttgggagggctgcctctcaggcctcaatcttatttcctgtttggttcccatgttcctgcttttcttttgctcactttatgtttcctattatattgtattgtattttatatggggtctccctctgtcactcaggctggagtgcagtggtgtgatcatagctcctgcagccttgaacttctgcactcaagtgatcctcctgcctcagcctccctagtagggggggaagacacgtcaccatgcccagccaattaaaaaaaaattttttttttttgtagaggtagactctcactatgttgcccaggctggtcttgaactcctggcttccaactatctacctgccttagtaaactactgggattataggcagaagccaccatggccagctcttttgccaactttgagggtgaagaaaggagcttttcctatactcccggacaaatggaacagcaggccagtggcaaaaaaggcaactcttagcaagcctgctattttctcttgtctcttgcttttagatgggccagttttgttattggaagtgagtcccaatccagaccccaggagagggtttttggatcttgtgaaagagaattcagggtgaatgcatacagtgaaagcaagtttattaagaaagcaaaggaataaaaaatggctactccataggcagagcagtagcatgagctgctggttggccatttttatggttatttcttgattatatgctaaacaagggatgaattattaatgagtttttcaggaaaggggtgggtgctttccagaaccgaggttttctcccctttttagacagtatatggtaacttcttgacgttgccatggcatttgtaaactgttaaggtgctggtgggagtgtcttttagcatgccaatgcattataattagcgtataatgagcagtgaggacgaccataggtcacttttgtcaccgtcttggttttggtgggatttggcaggcttctttaccacatgatgttttatcagcaaggtctttgtgacttgtatcttgtgctgacctcgtatctcattctgtgactaagaatgtcataacctccagggaatgcagccccgtaggtctcagccttattttacccagctcctattcaagatggagttgctctggctcaaacgcccctgacagtttcagtctaatcttacctcttgcttggaagaccttactgaagaagttgtcagcacactccaaaatccaaaacttttttttttttttacaacatcctttagtgttaaagcctcaggaagcatatagtctaaatctcaggacttactagccaatggtttaaccagccatttactataacttaacaaagaattactaaattctcagatatcaattatttcttttcactcaaatgcttccacttagccttgcaacatcccacttctggtattagattctgtatcagtgaggaaacttttggtagtaaaaaattttaagcaaaaaataaagatgttggaaggctcccagaggctcaaagaatcatcaggagactggagagcatggctggaaaacctcagcagccatcctctcgaggaactgcctggtcagtgcggggcagggtggcatggtgctgtggccaatccctgcttattttctctttgctcaagattccaatgcctgggaaagaacatcagactgatcaagcttaggccacccgcccacctctcagctaggagtaagtagaaccaccaacctatgcctggtgcagaagaggtgattccaataaaggaaactaggatgctgttagggatggggagtaaatgtggggcagttctaatccaacagacttcccttacacctagtgatgttggttacatggtactgtagacgttattccattcagtcatggcagttggatcaaaatgagaatgagttggagagttctataggaagtcaaatagtagttaggtggtaagacttaagctgttaggggttaaaatgtaacagaacaggacgggcacagtggctcacttctgtaatcccagcactttgggaggctgaggcgggcagatcacgaggtcaggagtttaagaccagcctggccaacatggtgaaaccccatctctactaaaaatacaaaaattagctgggtgtggtggcacacatctagtaatcccagctactcgggaggctgaggcaggagaatcatttgaacctgggaggtggaggttgcagtgagccgagatcacgccactgcactccagcctgggtgagactccgtctcaaaaaaaaaaaaaaaaagaaaaagaaaaaagtaacagaacaaaatttttatttaattaatgtcagtttcggtttttaaaaatcccagcactttgggaggccgaggtgggtgaatcacaaggtcaggagatcgagatcatcctggctatcatggtgaaacccagtctctactaaaaatacaaaaaatcagcagggtgtggtggcgggtgcctgtagtcccagctactccagaggctgaggcaggagaatgatgtgaacccagaaggcagaacttgcagtaagccaagattgtgccactgcactccagcctgggcgacagagctagactccgtctcaaaaaaaaaaaaaaatcttttaagcatttttatttttttttctttttctttttgtagagacagggtctccatatgttgcccgggctggtcttgaactcctgggctcaagcgatcctcccatctcggcctcccaaagtgctaggatgacagccaccacacccagtctgtttggtttgtttatttaggtatttgtctctgaggggcaaatgcaaatgcatctagcagccagcaaggcattatgttctcagaagctagttattcactcccttactcacccacccatttaattgatcactgaatcagaacttattgaacagtttcttagtcctgggcaatgtctagcagctaagtagatacaaacatagatgacataatttctgtcctcaggtggcaatgagtgacagtagtagtagagatattttagtctacttagaaggcatggttcaatgtgaaggctctgaagtcagacatagaagagtgcagtgttgggttcaaattctggctgtgtgactttgagcaagttacataatctcttcaaatctgttttctcatctccctaatggggatagttactaattcaaagcatcgttattcttatcaaattgattcataaattcaatgcaatttcattcaaaatcccagcatgtgctttaatgaaaatcgataagcagtgggagtctaaaatatgcatagaaatgcaaatagccatgataatcctgaagcaaaacagagctggaaggattatactactgcatatcatgccttattggaagttacagtaactaagatagtatggtattatggacccaaaatagacaaacgcatgaatagaatagagggtctagaagtgaactgacacgtataggccacttgatttatgataaagataatatttcagagcagttggaaaagatttttttagacaatgtccttttatgtatggcttatttcacttagcatactgtcttcaaggtttatccaagttgtagcatgtgtcagaatttcattcctttttttttattattattatttttgagatggaaactcactctgtcacccaggctggagttcaggggcacaatcttggctcactgcaagctccgcctcccgggttcatgccattctcctgcctcagcctgccgagtagctgggactacaggcatccgccaccacacccagctaattttttgtatttttagtagagacggggtttcaccatgttaaccaggatggtcttgatctcctgaccttgtgatccatccgccttggcctcccaaagtgctgggattacaggcgtgagtcaccctgcccagcgtttaaggctgaatactattcaattgtatggatataccacattttgcttatacattcgtgttgatggacattgggttgtttttaccttatagctattgtggatattgctgctatgaactttggtgtacaaatatctcttcaagtccctgctttccattcttttgggtatacatctagaagtggaattgctggatcatgtggtaattccatgtttaattgtttgaggaaccaccatactattttccacagtggctgcaccgtcttacattcctgtcagcaatgtacaggtttccaatgtctccacatctttgccaacacttctctttgtctgttttttttttttcccaaataatggccatcctaatgggtaagattctgtttttcaaaatcactttttgccgtggtaaaaaaaaaaagtctcactttggctcactatgattactatactatgaaatttaacaataaacatttaatgggtacttgtcatctgctatgcacttaattttttatcttatttaattcccacaacatcatttcttggcaacctttctattgaactataacatacatacagagaagtgcacaaatcagaaatgtatagattgatgaattttcacaaagtgaatatatccatgtaatcagcacccagatcaaaagctaaaaacattaccagtgccccagaaatctcactggtgccctctctcagttctgttcagcccccactacccacctactccaagagaaagcaaagataataactttaaacccatagattgtttttgcctatttttgaattttatataaatggaacagaatataaaatctttggtatattgcttctcttactatgtatgtttatgaggtgtattcatgttgttgcatgtaatagttcaattattctcatactaaatagtattccattttatgactacagcacaatttatccattctacttttgagagatatttgggtagtttcctggttttttttttttttttttttttttttttttttttgagacagagttttgctcttgttgcccaggctggagtgcaatggcatgatcttggctcactgaaacctctgcctcctgggttcaagtgattctcctgcctcagcctcccgagtagctgggattacaggcatgtgccaccacgcccagctaattttgtatttgcagtagagacaaggtttctccatgttggtcaggctggtctcaaactcctgacctcaggtgatccacccgccttggcctcccaaagtgctgggattataggcgtgagccaccgcgcctggcctcctgttttgagctattactaatggttctgctgtgagcattcttttggtaaataccttttgatgaaaatacgtgagcaattctatcgggaatttttccaggagtggaattgccaagtcacagtgcatggatatgtttagctttaaagatgatttccaaaggaaattgataagtatacacatccagcactgaatatgagtcctagaagctccaaacactggctggcatttgatatcatttgtctttttcattttagctactctggtgaatgtacagtgatattatgttatgcttttaaactgcatttctttgaggagtagtgaagttgagcactatgttcatatctttatcagccacttggatatcttctttttttttttttttgagacggagtcttgctctgtcacccaggctggagtgcaggggcgcgatctcggctcactgcaagctccgcctcccgggttcacgccattctcctgcctcagcctcccaagtagctgggactacaggcgcccgccactacgcccggctaattttttgtatttttagtagagacggggtttcaccgttttagccgggatggtctcgatctcctgacctcgtgatccgcccgcctcggcctcccaaagtgctgggattacaggcgtgagccaccgcgcccggccggatatcttcttttgaatagtatttgttcaaatattttgctcatttttctgttggtacatcttcattgtctgccttctgcttattaatgatcaatgttctttatatattctaaaaatgggttctttgtgcattgtgtattgcaaatatctattctcatttgtctttttactcacttcatgatgtcttttgatgaacagaagctttaaattttaatctagtccaatttattaagttttggttaaggctttttacgtcctgcttaagaatctgccatcctacaaagatcatgaagatattttatgtcttattctagaatatttattagtttttcttctacatttagatctataaggcacctaaattattttttatgtatggtgtgaggtaggcatttgggattcatttgtttcccacatgcatagtcatgaaaatgaataaaattgtgaatttggcacagttcaaataatactaactcctttttgaaatattctgcagaacctcaattttttttttttttttttttttttgagatgtgggtcttaatatgttgcccaggctggtttcaaactcctgggctcaagcaatcctcccacctcagcctcctgaggatctgggattacatgctactgtgcctggcctaattagatttgatgaatgaattaattattttaaattaattcagtatttttacacatctagtgtttgccagtttagctaggttggtaaagaaagtcctctcagagccaacatttgagctcagacctgattgatgaaatgaagccagccacaaggggattgggggaagaacatttcaggaagaggcaagaggtaggtaagtaaagtttgatatgttcaaggaacaagaggaaggccagcaccgctgaagtgtaatgcccaagatgatgtgaaatacaagacaattcttatgaatgggagagcaaaggaaagagaaccagacggggatcactagaagataatggagcaatgctttcaaagtcccgagggaaaatgtttttttcaacctagaattcttttttaaaaaatttcaatagtttctcagttacaggtgtttttggttacatagataagttctttagtggtaatttctgaaattttagtacacccatcactcaagcagtatatgctgtaccctatatatagtcttttatccctcaccctcctcacacccttttccccttgagtccccagtgttcgttatgtcattcttacgcctttgcatcctcatagcttagctcctacttataaatgagaacatgtgatatctggttttccattcttgagttacttcacttagaatatggcctccagctccatccgagttgctgcaaaagacattatttcattcctttttatggctgggtagtattccaatatagcatatataaaccatattttctttatccacttgttagtcgatgggcacttaggatggtttcatatctttgcaattgtgaattctgccactataaacatgcacgtgcatgtatcttttttatataatgacttctttacctttgagtggacacccagtagtaggatttctgtgtcgaatggtagttctacttttagttctttaaggaatctctgtactgttttccatagtggttttactagtttacattcccatgagcagtgtggaagtgttcccttttcaccacatccacgccaacatctattattttttgactttttaattataactattcttgcaggagtaaggtggtatctcattgtggtttaagtttgcatttccctgatacttagcaatgttgagtgctttttcatgtttgtcttcttttgagaattgtctattcatgtcctttgcccactttctgatgggattatttatctttttcttgctgatttgtttgagttccttgtagattttggatattagtcctttgtcggatacatagtttatgaatatttctcccactctgtgggttgtctgtttactctgctgattatctcttttgctgtgcaaaagacttttagtttaattaggccccatttatttatttttgaatgggtatacaatttaattaggtcccatttatttatttttgtttttgttgcatttgcttttggggtcttagttatgaattctttgcctaagccagtgtctagaagagtttttctgatgttatcttttataattttttgtggcttcaggtcttagatttaagtctttgatccatcttgagttgatttttgcataaagtaatacatgaggatccaatttcattcttctacatgtggcttgccagttttccagttttcccagcaccatttattgaatagggtttctttttcccaatttatattttgtatgctttgttgaagatcaattggctgtaagtatttgatttgatttatgggttctgtccattggtctacatgcatattttaatgccatgctgttttgatgactataaccttgtaaatataatttgaagtcaggtaatgtgatgcctccagatttgttcttcttgcttagtatttctttggctatgtgggctcttttttggtttcagatgaattttaggattgttttttctagttctctgaagaacaatatggtattttgaggggaactgaacaaatctgtagattgcttttggcagtatggtcattttcacgacattgattctacctatccatgagtatgggatgtgtttttatttgtttgtgtcatcaatgatttctttcagcagtgttttgtagttttcctcgtagaactctttcacttctttggttagatatatttctttttgtttttcttttcttttctttttttcttcttttctttttcttttttttttctttttttttttttttttttttttgcagcttcaacctagaattctatacccagtcaaattatctatcaagaatgagggcagaataaaggcagttcagatgtacaagaactcagaaatttttcctataaagcagatttccttagtatttttacatgagaatctactccaacaaggtgtggacaggaagaggaagataaagccaatgtaggaagacaatagagtgaagggcgacaaagaaagccgtgtatcttctctagagaacaattggctcagactggagcacgtatggaagatatttttgagtatttttagctgcttcttgtgtccctccaatccattatccatcatattgctcaagcaaacttggtaaagttttagattaccttgccctctctgttgaaaatccttcaatggatcccattagtttcagaataaaatccaactttcaagtagtataaaaggccatttgttattgacccctgcctgcctcttctgtctcacttcttactactcttcttggccacttctgccctctgctccaatcactgatatttttagatttcttaaagctacttactgcatcagaaacgttgcatctgctattttctttctacagagtaacaattcttcccctcttttccctggaagatccttccttgtttttcaaaactcattatttcaggaaatcttgtgctcgccttgtgctcacttccacccaccactggtttaagttcccttggttggtacctctgtggctttcctatatgattcacctctaataccactctgtctctacttaattattgatttatttatctgctctcctcacttaatgataatctcctcgagaatagggaccacttttttttttttgatggagtctcgctctgtcatcaggctggagtgcagtggtgtgatctcagctcactacaacctccgcctcccagattcaagcgattctcctgcctcagcctcccgaatagctgggactacacgtgcgtgccaccacgcccagttaattttttgtattttagtagagatggggtttctccatcttggccaggatggtctcgatctcctgacctcatgatccacctgtctcggcctcccaaagtgctgggattacaggcatgagccaccacgcccggcccaggaactgcgttttgattgttgttgaagtttctataatggctaagtactccagcttctctgcagccagactgcctgggttaaaatctcagctgcatcacttgctatgttatcttgggaaccctctgagtcttggttttctcacttgcaaaactatgcgatattttcatctgcagcacctggcacacaagatgctcgacagtgtgtgaggaatgaatccgtgcagacaggcagagttcctggggatgggaacctctcagcaggggagttaggatgactcacttcaatcaatcttgattcttaccctcccttcccaagtaggaatgctcagcttcctccagaaccgttatgctttgaggattgtgagcaaaatctgaaaaatgtggggtcttttcctttgcatgtttatccatgtgttaacctaaggaattcaggatatctcacagagcaaaaatgtctaaatcatgtcactgcctgacaattcttatgtggctgtctaaacaggatgttaactttaggacctaaattttcctaggtgtgagtatgttagttaaggattaccgagaggaagcgaagggatcatgtacccattctgcaggtgaaaaacctcatgatcttctctaaactcccctgggcctaacgacttacacaacttgtcaggaatctaccaagaggaggtccccggctcccaaatgtcccctcttcaccagcaaaatgaatattctctcttttttttttttttttttttttgagatggagtcttgctctgtcgcccaggctggagtgcagtggtgtgatctcggctcactgcaacctctgcctccgggttcatgtgatctcggctcactgcaacctctgcctccgggttcaagtgattctcctgcctcagccttcccaagtagctgggactacaggcgccacgccaccatgcctggctacttttttgtatttttattagagatggggtttcaccatgttggccaggctggttttgaactcctaacctcagatgatctgtccacctcagcctcccaaagtgctgggattacaggcgtgagccaccacgcccagccgaatattctctttttagtcttatgggggaggcagcattcctgtggggctgctctacttggaatgggtttctagaagtaagaaagttgattcttctcaatgtgttcacaagtttcagagcatagtcaagaatgaatcgtaccatctatgtttcctcccatgttacctattcctgcaagcaatcattttccaggagaaagaaatagtggagttcagactgagctagctgaccatcaggccttcctcaccctctcaacagagagagtaatcagatatcagagtgggctccaactctgaagctttgatggttaatgcttccaatctgagcttctccaattctctttttcttttttcatctccctatcctatactcagggacccctttgtcacacaggtagatctgtggacgacagcttggatcacaaagtggggacaatccattttctagaaagtatattgagtgcaacattgattcagagtgcaataccctgaattcaaggttgcgtttcagcttttctctattcaagatgctgtaaagatggtcccttcttgtagagggcttatggtcaagcaggtcaagccaatgcatgtcaagaaagagctccgaatgcaggttaagtagcttttcttctccacgagttattaaacttgaggctggccaagggctgccagctatgggcaggaggtgcaatacccacgtttacatatatgctgctaagttttgatcaacatataaaaattagttttcttacaaatgattacactcttccctgtcaaactgaacactgaggttctatgcctcaaaatagtttaggtccaacttactttaagatctagatggcacagggcaaggttccatcaagccattgccaaggaaagcaagggagtttgctgaagcattcaagaactttgccttgattacataagagatgtgttcagggcaggaacgcaatgacttggggggcaaaccaggaagtagtgggttcgttgctaaggcttttggaccctgaagacattgtcgtgctgtagttgtgatggtgttgtcataattgctggcttgtttcctgtggctttgagtcttttgatccctccaagcatgccagcaaaaattctagtgtttgaaaaagctaagagctattgtattatctacttatttcctgaagtcccccccgcagtagagttgccaggtagaatttaggacatccagttaaattagaatttcagataaacaacgagtaggttttatttttatttttattttttttagcataagtatgtcccatgcgatattttagctaaaattcaaatttaactttaagccctttttttttttttttttttgagacagaatcttgctctgtcgcccaggctggagtgcagtggtgtgatctcagctcactgcaacctccacctcctgggttcaaacgattcttctgcctcagcctccccagcagctgggactacaggcgcccaccaccacgcccagctaatttttgtatttttagtagagacggggatttaccatattggccatgctggtcacgaactcctgacctcgtgatccacccacctgggcctcccaaagtgctgggattacaggtgtgagccactgcacctggcccctggaagtcttgtattttgatttggtcaatctggcagccctacctctgattcccttctagttattgcaaagtgacaaatgcagctccgctcctgggctaatgttttgtaatgtgcaccatctagtggtgacatgaacagaaggaaacttcagaaacaacctgaaaccgtgatgggataaagctgaaaagaaagaactataattttaaaaattatttaaaaacttttttcggccaggcgcggtggctcccgcctgtaatcccagcactttgggaggccgaggcgggcggatcacgaggtcaggagatggagaccatcctggctaacacggtgaaaccctgtctctactaaaaatacaaaaaaaaaagttagccgggcgtggtggtgggcacctgtagtcccagctactcgggaggctgaggcaggagaatggcgtgaacctgagaggcggagcttgcagtgagccgagattgtgccactgcactgcagcctgggcgacagagcaagactctgtctcaaaaaaaaaaaaaaaaaaaaaattctaattttcttctttggatgtggtgtttgtgatgagaccagtagtttagattgtccagtgaatatttgaaatcccttaagtcatcaagtgtttaaacagccacacccacctggctgaggccttgggctcctctattaaatgctaatgcacagtgttggccttgatctattgtggttcctagtgctccaagtgattattttacaataagcacgtggtgtccagcagtatctatcaagtacaataaatgtcgggttggtgcaattctgttaaacccaactgggcctggaggaagacacaagaagcaagtatttcctgtttactattttactggggttgggaggatggttaagagctcaaggaattggcaccccctaatggatctccctctggctgcacactggaactacctggggtgtttgtaagacataccaatacctggaccttacccccagagatgtggatgtcattggtttgtagtgggaatcaggcttggtttttttttttgtttgtttttcttttaagttttccagaaaacttttttttttttttttaaatttgagacggagtctcgctcttgttgcccagtctggagtgcaatggcgctatcccgactcactgcaacctccacctcctgggttcaagcgattctcttgcctcagcctcccaagtagctgggattacaggtgcccaccaccatgccctgctaatttttgtatttttggtagagatggggtttcaccatgttggccaggctggtctcgagttcctaacctcaggtgatccgcccgccttggcctcccaaagtgctgggattacagaagtgagccaccacacccagcccagaaaacttttaaatgaagccagggttaaaatgcctattagcagaaatggcccagactgaaaaaaggtgtgatctttgaacaagtgccttaattcctctgagtctcagttttctcattggtaaacagggagaatttaaccaacctgctaggaaccttagagagagtaaatgtaacacatgcaaggcatttagcctataactagcactgagtaaatgctgttcttcttctagacaggaggctaagggggtagattcctaccactctggaggagagaatccagatctgggatgagctacaatctggtcataggggccaaatgttatagcagagagaaggggtatgttaagttctgctaactacccaggcctaggtgtgaatggggcttcacggtcttgacaaggaaggcagggccttagtgaattacaatcatctattgtaatagtaaggttctgcctataaaagtggaaaatatagacagcatggagcaacataaaaaagaaaatataggccaggcgcagtggctcatgcctgtaaccccagcactttgggaagccaagttggttggatcatgaagtcaaggatgaagaccatcctggccaacatggtgaaactctgtctctactaaaaactacaaaaaattagcttggcatggtggcgcacgcctgtaatcccagctactcaggaggctgaggcaggagaatcacttgaactcgggaggtaggggttgcagtgagccgagatcgcgccactgaactccatcctggcgacagagtgagactgtctcacagaaaaaaaaagaaaatataaactaacttagctccagagagagccactatgaatatttgatagtatttatttccagcacttttctctctgtagtttctgcttccccaaattgtcatattttatacttaattttgtaaactgattctccccactagtttatcattgtatcaggatcatcttccaatgtcattaagtatcttttgaaacacaattttcagcggctgcataatattgtgttatgtcagtggttctcaagcttgagtgtgcatcagagccacctggtgagctccttcaaacagatttctgggcctacctccaacactgttgactcagcaggtctggggtggggctctgagattcggcatctctgacacgttcccaggtgctgctgctggtgttggtccagggatcacactttgagaacctcttgtttataatctgcttccttgtctgccacccactccaaatgcagggggtggggccagggaccatgacttaaacacccctgaattgaatgccctgtggctaaagcagagcctgtcacatagtgcccttctgagtccagggtcctgaagccagcctgctgaggaagaggaatgacatctaccctctgtggccctgaggctgactggggctctatgaatggaagtagcagggaaactgagtttggttctgctgtttctagcagtcagcaacagaacctacgaatgccacgttcagcgatgcattctctgttaccagagatatttcagcacaggtggtgatggctcgggaattttgcagtatttgagggtgggtaagaaactccactgtccacttcaaccttaagtttctgtcagtctgagttcatcaaagcaaaagaatggtgaatcatttctggagacttcatgggaatggggattggaccctaaagggtgggcaggatttagaaggcagacaaggagaagacaacctccaaatagtgtttggtcactggtggtggtggggttgggggagcggggttgtggggaagcatgtgctaattgatgagttaggtaaatcaaacttggtaaacctggttcctagaactcctatgtgtaatgcatcgcccttgattttccagagaaattcaaaagttagtagctagccaagatcagagctatttggtgcagagcagttgctattgctaccacttattctccctctccctccttccccctcttcctccttcttctgttgaaaccatgtgagtttctacttctatcaggtgttaaagtagtgcattcctgcaaagctgacattttaataagaaataaagattgaaatcagatttcacgtgaagtttgagacattttagggccaaaatctccttctcagcctatccactgcggctcattggtgctttgttgtattttgttttgttttacagacaaggctgaaaggcaggggagtggatgtctaaaatccggtgtctgatgttctgtgattttatcacaacgtactcattacaaaacggcatagaaacgctatttgcaatttagtccaggataaagatccagggctcaatttgttctttgaataggttttagaatacactggaggattagagacagttttttgatgaaaaatttatttccaaatactttccaaatttacaaggtataattataatagtaacagcaacaatgaaaaacaagtcctgcagtttactgtctcttatttgccagaccttaatcaggatgctttgacacccataatctttgtaatctaaaaatgacacagtgaggtgggcactatatcctcttgttacacatgaggctcagagtttaccttcctaagctgacatagctgggctgttactacatccagccttgtgcgcctacaagtcctttgcgtttccacttctgatctgccaagactgcagtgcttagttgggtagatttctttcccccgctaagctcacttttgtgatcaagagctctctgctgagtcctttctgtatctgtgacagtttccagccagagctgcccagtatttttaggtacttgaaactagattaaaaaaatattcacttccttctgggtggctcaggaagtcaaaaagcagttttcatttttttttttgtttagtagcacttagctttgagtagtcaggtcacctgggggtcttactggggacttgatgaccttaaaggctagatctaaggacctatgaagcactcccgcttgaaaggaggaagaagaaaacacacaaccatttgtaggaggaatagtggagatggaccaacccagaaactgtatttcagaataaattcattcctttgtgcttcaaggcccctcatactgatatgatgtcaccaaagctgctccagggctgtgacctgctagtcatggccctggggcacatccctttgctctccttctcagcatactgcagcagcagaggtagggtgttagggggtgtgcagattcatccctttctctagactatgagttcttgggatagggtagaccacatttccccaaggagtttgtgggtattcaagagaaagtggttgccgagcacagggaatgggcagtgggctagaagcagccaccttttcagggctttgcctggggacttggaactgcctggattagtcactagggagagttttcaaaatctttatggtgtcatgatttgttaaatcttgtccacatcagagcctgtggtttttctgaatgccttagaaagttagcctctctggccaagtgcagtggctcacacctgtaatccaagcactttgggaggccaaggtgggaggattgcttgaggctgagagttcgagaccagcctgggcagcatagagagatctcatctctacaaaaataaaaaagactgggcgcggtggtgcatgtctgtagtccccactgctgcggatgcttgagtttgaggctgcagtaagctatgaaggcaccactgcactccaggttgggcatcagggcaagattctgtctcaaaactaaataaataaataagtaaataaataaataaataaatacagttagcctctcctctgtggccccagagctcctgtacatatacttgtctcaagacttcacatactgactccttcattcagtgagtgcttactgagatcctaccaggtgctgggcacaagaatgaacaagacacttatggctcctacccccatagagtttacagacaaggggagaggcttatagtcacctggaccgaaatggtgcccccagtacactgtgagctccttgaaggtacagatcgggttgtattgagttttgcaaattttcatttattttattttaaactttattatgtaatttacatgccataaaattcaccattttaaagtgtacaattcagtgcttttaatatattcacaaggttgtgcaaccatcacttctgtctaattctgggacattttcattgccccaaaaagaaaccctatgaccgtgagcagctgctcctgtttctcctccccagtccccaacagataagatggtaatcactcatctatttgctattctatggatttgcctttggacatttcatatctgcatatggacatttcatataaatggaaccatgcaatatgtggtctctttggtggacttactttaacttagcataatgtctccaagctcttccatgttatagaatgtattactacttaatttctttttatggcccaatatcccattgaatccattgcatagagatactacagttatccatttatcagttgatgaatggttctacttacttttttctttttgaggcagggtctcattctgtcaccaaggttggagtgcagtgctccaatcacagctcactgcggcctctacttcctgggctcaggtgatcctcccacgtcagccttccaagtagtggggactacaagcacacgacaccatgcccagctaattttttgtatttttagtagagatggggtcgcatcatgttgcttaggctggtctccaattcctgggctcaagcaatccacctgcctaggcctctcagtgaagggattacaggtgtgagccaccacacctgactggttctatttactttcgtattttgtcccttaatatctttctccctccctcttgcccttccttctttccttcctctcttctctagtcctccttccttccctctctcattctttctttcctctttcaaatacttgttattccacacctaccatgttatggacactgtaatgaaccttctggtaaaggttccagactaaagaaaacgaaaaagcaccattttaaaaaagttttaaataaatgctttgttttaaaatagttttagatttacagaaaagggccgggtgcggtggctgacgcctgtaatccccacactttgggaggccgaggtgggtggatcaactgaggtcaggagttcgagaccagcctggccaacatagtgaaaccccatccttactaaaaatacaaaaattagccaggcgtggtggcgggcacctgtaatcccagctacttgggagactgaggcaagagaatcgcttgaacctgggaagcagaggttgcagtgagctgagattgtgccattgcacttcagcctgggtgacaagaacgaaactctgtctttttaaagtaactctcttttttaagaaactctcggccgggagcagtggctcacgcctataatcccagcactttgggaggccgaggcggctggatcatgaggtcaggagatcaagaccatcctggctaacacggtgaaaccctgtctctactaaaaatacaaaaaattagccaggcgtggtggtgggcgcctgtagtcccagctacttgggaggctgaggcaggagaattgcttgaaccctggaggcggagcttgcagtgagctgagatcgcgccactgcactccagccggggcgacagagcaagactccatctcaaaaaaaaaaaaaaagatttacagaaaagatgcaacaggagtacagagtttgtgtatctcatcccaagtttcccctattgttaacattttacattactctagacaagttcagggtggtgtggccatagacttacattactgtagtccatttgttgcaactaaggagccagcattgttacactactgttaactaaactctacactttattcatattccactaatttttcctaatgactttttcctattcctggatcccatccagggtgccacattgcactcaatcatcgtgtctccttagccccccagtctgtgacagtttctcaggctttccttggctttggtgaccgtgacagttttgagtagtaggggtgaagttctttgtagaacatccattgctttgggttgttctgatgtttttctcctggttaggctggggttacggttttctgggggaggaccaccctagaggtgaataaaggcaccatttttaaattgctgtgaggtgccctgaactaagaagtgagaccaaatctaccagggctattcagaaaaaaatcagagaaatcttacttttgaggtctttaaatggtagtggtggggtatagaaggattccttggaaattttttcctaaggaagttgtttgttgcctatcatcatggtggtgactaaatgagcctttatctgacatatagacaagatttgacatttgttcttttcctccccattggctctagagtgtggccttgggtgagtcaagccttcttccttggcctctatagaattaggaagttggagctaatgaccttggaggcctctttccactgtaatggcttatgctataataggtggcccataactcccctcaacatctgtgaattccaaagttgggctcccctctgctcctctatcagtccaggctgtttgtattcaggtgacatgtgcccctagggacgtggcccaccccaacccccttttcaaagccttccttgcagacaaacacacacacaaaaacaagccctagatatttgcagcatggatctccacttcgaggcactcagtgaacattccagggcagcagtgcccagagccggacccctgccctggccatccctgcagccctgctgacacagcacaagagccagcatggccagggtcacaggcagacctacacgccacaccatgctggaggctctttcaccccaaggggctgttttggttcagcagctcctgtgtcttgaataagttaatcactgatgacaagagattaatttataaccggacagcagacaagatagttcgggctttggcgaggtggcactgaactgtggcgcagggcattgctcaaaagacacctgggtctgcagcttggtgcagaggctgggaacttcagatcctcaccggttccccagaggccacttggtccaaagagaggaaacacgtgctgaggacttctgtttcctctctccagcacatttacttgtagaaaacatgtccaggcaacaggcaggcccgttagaaaagtccagttaagagagagcaccggcatgccaacccagcccaggcccattggaggaagagggagaggggtggggagagaggaagtcatggaaagatgtggaaggatagatgggagcctggggtgagagctcattcctacagcctgagtcacccagcgtgtggattctcccctccagctcaggcagggctcaggcaggtctttgaggatctgccctcccatcccacaggcatcctctctgttgtttctaacgttaacctcctcattctgggctcaaaaaagaaaaaagatggaagtgcagcatgatgtgcaggcctctctggggcctgaccttcatgctccagatactgcttttatattaagtaaggtgacccttctctgccacactggagatgcgtggctgtagatattggctttagggactactatttctgccagcttcagcagtctcctatatccagccaggatagtttagagttcttaaatcaggcctatttatcaaagaagtccatggcaatacttccctgatggccatgggacctcaggagcccacagtctaactagagaaagaacatgagaaagagggagacaggaaatgggactgaaaataggatggaagctgcatgaaaaatgggggtgcagaggaactcctctggggactgccaaaatatgggcttcttacctaaaagggctctgggagcccagctgagtggtgggtgacttacgcttgatcgtcccccaggaatggattcttgtcatttggattcaaccctgctgccctgtccccatttgttcaccccatgtgcaccaatgtctctgtctctgtctttgtttatgtcattcccttgacccagaatgcccttcccagccatcaagacctggctgggacatcatttgtgctggaaagccttccacagatctttatgtgggacctccttctctttggtccccgtgcttctttgtatctattgcaacagtatctgttggttctgataggcagattcgtgtcacctgggggaccttgttaaatacacaaatcctagccctgaatcacaatctcttggggtgggttttgggaagctgctttcattggtcttcatatgtgttttgaatgcctagccagggttggatatgtcttttctggactgtgtctcctgggggtgggcacagaacttacatcatggtgaccacatgtcactgtgcccagacagcctcctaggcctggcaaaaagggatgcagagtgcaaggcccacaccctttaattcacaccattttaattcattcatagttcctgcttcatgccccagacactatgctgggtcctggggatacaagagcaaaacccaacatagtttgccttcacacggcttccagtctaacggggggagaatagaggtgactcaaattccctacacccacataattacaaagtgcagcttgagtgttgtaaaggaaaaacaaaggtgctcagagaacctgcaatggggactctgatgtaggctgggaggtcagggaaggctgaggagagcccgaaaggaggggcagtaaaggaggggaggggctggaaacagtctcttactggggtcttctcagaactgtgttcatttaggccagctgggaggcattagggtgtaagctcctctacagacacccaagatcgtttccccatcttctccccacgcctgccccgccacccagccttcacttctgctttcctgccatctgctcttgctgtgagcctttgggagctgttgtgtttgttaacaaaggaaagacccatttttccatgctgagtggctgcctgctagcatatacagtgcctctactgaattaccaaaaggtgcacctccatttgaactgacctaaccttgcactgaacacatgacttggccggtggagctcaggctggatttaagcagctactcctgcctcccctacccacttttggcccagtgcccttgtgcagtgaacaacttggacaaccttctgtagtggccctgctgcagtctcctcttaggcagaaagttctggcttcttggctcaccctcacagctagaagattcctttatcccagaaggagataattacatcttctatggcataaatctgtttggacatttagagaagaatttatatgtattttctgaaggactgggtgtttttctgatctaaattgaaatgatgattcttttaaatatgatccaagagagtcctttcatgtggtaattcacacacactctggctgataagccctagacttggcaaaaggttcaaagcagaaactgggttcagatgaggcacagggatactttttgatctgattttcttctagccactgacattgggagaattttggcctctgagtggcagtgggccccaaaaagcctggtaaagtaagatcttttttttctttctttttttttttttttcttttttgagacagtcttgccctgtcatccaggctggagcacaatagtgcagtctcggctcactgcaacctctgactcccaggttcaagtgattctcctgcctcagcctcctgagtagctgggattacaggtgcacaccaccatgcttggctaattttttctttcttttttttttttttttgtatctttagtagagacgggatttcaccatgtttgttaggctggtctcgaactcctgacctcgtgatccacccgcctcggcctcccaaagtgctgggattacaggctttagccatcgcgctgggccaaaataagatctttttaaagaaagtctgaaatgcctagaaagagtagaggagtccttactacacttggctttagaaaaagaagccttttctgggagaagataactctcatcacacactaagcaagtcagaggatctgagctggagtggcccttgagaggtatctcatctagatccttctttttaccctttggaaaactgaggctcagagagaggaagtggattggcttaggtcccacagtgagtggcagagccaggatcacacctgacgggtgcttgcttctgcacctgaaccttgagggtcgctgttcccccacatagtagtgccaacagggtcccctatgaggatggtgcaagctcaaagggtggctgtgtgtgggaatggtgagaaggggacatcatctaggaccataaatcatggtgtctcctcaagcccagtgtggcccctcctcttccagatacagaaagctgcttctgctacttaagggacaggcatcatcttcaagaggtaacactaggaatagaatgagaactgggagtggtggaagcggaagacagaagctgatcttatggacacagaagagtatgtaagtgaatcacaggccatatcacagtttcatcagtgattataataattggttttgggctgggggagtattggttgtcaaagtgacatcctcttttaggtgccatatttttccatgtctgacgtcggaaaaagcactttcagttgtgaggataagatgagctcacaggtgctcaggaaatggcagcatctcttgagagattctgttaaggaaagtggaggaggaagggaactagatataaatcttctcctttaatactttcaggaggtatggttctccttatctcactgaaaaggaaacagggcaaatttcctgcccaaggtcacacagcccaaatgtagggaagctcagctcttctgattctgggccattccccccacttcaccttgcagtgccatgctagcttctcttagacttaccgttaatttccatcagtttcagctgactcatcctttcctcccaggccctgagaccacacccagggttgtttgtttttaactctaagatcatcctgttttccataggcctgagctccatcagcaagccaggaccctcttctgatccatactccaaagtcagcataaacatctccagccaaagctgttccttgttctgtcagtaacacagttcccgaggagaccagggcctctttccttccgttgtctcctggttgctctgcttctggtgacgaaacaggggcagcgtcaaatgaagaacatcatctgtcctacagactaggcaactgtgaatttttcatcaatcctgatttctctaatgaattgcaacatgctctaactccaacattcaaaattcaacatttccattccctatttgttaagggtgcaggtgaatatgaaaaggcaaattcaaaaggtgaactttcctatctctgaagggcacatgcaggagcctgaacccggctgggagccaggagacctgcattttggtcctgactccctccctgctgcctgtgtgctcttgggcaagttgcttaatcattctgggtttacgtgcttgttaaggactctttcagtgcaaatattttataattataaacactgagaagatcctgtcaataatgtagttcctttgtcatgctaaatgtcacacatgcatcatggcctatgatacctgatgagtttagaattttttcttgattggaacagggatgggtgtttaaaacaaaagacttgagtcctttccagctggggccctgagtctgtgggtttggtaagtcaattaggctgcagagtcacaagtagtttaccttgtcaaaatactagccatttgtttaaaatcaaatcctcaagatggagtggtatttccaaactccactgagttggagcctcagaactagagaactggataatggagttagtccagcacatacttctgctttgctaataccttccgtttttgtctagtaccccttggtagtgaaatatctgttctgggtctttccaaggacaaccacatccgagtggggagaaggccgacattcagggtgctggaagggtggggtggcatgattcagatcaacagggctgactttccactgtttcacctcacttgcactgtagccaccagttctgggactcctcagttgacagatgtggagacccagagtcaaggaatgatgtcccctaggacccctggggaatttgacacaaccacagtcagcacctggctgccatcagcctaaggctgtcactcgagagggcttcctctccagatgaatacaagctgacttgaagggtaaaagagtctaaaaaacatacgattatcttaagaacaactttaacacatgtaaataaagacccatagatttttatttctattttcagtcaaacacatatcaaaacccggcatgttttcaaacaccacggcggatacttgatttgtatttcctgaagccaccccagtgagccactctgaaataaattaaaaagaatggtcaaggctgaatgcacactgaggtttccatgtgctcagctcagcagattcaggtatgacccctacagagcttggactctgaactggcactgacattctctacgctcagcgaccatttcacacaatgaattcatctgtgtaattgtgcctagctgtccccagattaactccatgtttgcatgaagatcaaaatgcttacttttcaaagtttggttttcttccatttctgtcttatctggggaggcattcatgcttggaatttcctgggcttttcttttttaaatctcatggagagactgagagtgttaagggggaaagagtagcaggcaggggcagggggcttgccttttattgttctttttttgaaacaacaattggcaatttttcttcactgttttagtgttctcttgttaaagacaacccagacctcagagtaatagcattcttgcttgcccccacccctaaatcctaccttagtcagaacatgagctagaattctgcatcattaaaaaaaaattcagccgaggcaggtagatcatgaggtcaggagttcgagaccagcctggccaacatagtgaaacaccgtctctactaaaaatacaaaaactagccaagtgtggtggcacgtacctgtagtcccagctacttgggaggctgagtctggagaatcgcttgaacccgggaggcagatgttgcagtgagccgagattgtgccattgcactccagcctgggtgacaagcgagacttcatctcaaaaaaaaaaaaaaaaattcgattgggttgtcagttacataaagagtgcacgactgaagtacctaccttgataagtacttatgtctgctttgcttataccttccgtttttgtctagtaccacttggtgatgaaacgtctgttctgggtctttccaaggacaaccacatctgagtgggaagaaggctgacatttggggcgctggtaaggtggggtggcatgattcaaatcagcagggctgactttccactgtttcacctcacttgagctgttctaggagaaatattggaaggcatgctgcacctttcttcacaatgggatcggcaggtgaaagcaagacatttgaatggagtggagtgtttcacttaatcattagcactgctgacatcaataaaaaacaaataatgcatatcatcagcatgagcacctacagtgagtggaaaggaggccaggttcttagtaagctttatgatgaggtaggggacagatgggattcaaagcggagccgaggaagcagtgtggcttgtatttcagctgcagcgtacaattatttttgtggtcgaagaatccaaactgcgccagctatttcaaaacaacatcaggagggcagaggtgtgttttccagcatccccaatgggtgccaggagacagccttgagaacaaacacatcttttcttgaaataggaagccaactatttagcttatgcaagtaatactataaaaaggcattgtaagttgacttgcagctcctgagctttggaccaacctctagacttgtttcaaaaggctctttctggaggaagaaaagtcctgaggctctcaggtcaagccctggctccaacaacaatttaaatcaagtaaaagcctccttcgcctataggttgaaccagcccaggcaaacaccattaagacagcttccaaacaaagatgacaatattaccatttcagcctgaacctggtttcaaaattcattttgtgaaatgtttaaagttggacaagccaagcagaactatagcattaatgagaccctaatgaaaattcatgcattcaactcattcattcaacaaatattgagtgggatgtgccaatatctattgactgggaatgtgtagtatgactccctggcatcattaaatgtgaatgtgaatgcaagagcagctggtatggttgtgctttcttcacaaattttgttcagctacacaggatcaggtgccaaataagcagagttggatttaaccagggctgtggtttcggcaaagcagcgtgaagtgaaggaagagagagttgaggatatgcaaggaagtgatggagatgaataattatgggattgaaaagtgaattttattttatgtttttgagacaggatctctctctgtcatccaggctagagtgcagtagcgggaatatggctcactgcagccttgacctcctgggctcgagtgatcctcccaccgcagcctcctgagtagctgggaccacaggtgtgtgccaccactcctggctcatttttgtatattttgtagagatgggttttcatcacattgcccaggctggtcttcaactcctgggctcaagtgatctgcctgccttggcctcccaatgtgccgggattataggcgtcagccactgtgtctggactgaaaagtgaattttattgaaaaataattttgttttttaatgagtaatagtcttgggttttacttgcattctaagcctaacactgccatctacgagctgagtgatctgaagcaagtcacgcttcctctctgggaccaagtcacttctataaaatgaggtggctggaccaggagcactagaagatagagaggatctgtatatgattgaatgagtcatatgaggtccctcctgctgaaggtcatgggtccagttttctttctgctttagtagactgggagcagtaagtataggatcagttttttgtttgttttttgtttttggttgtcttttgttgttgttgttgttgttgttgagacggagtctcgctctgtcacccaggctggagtgcagtggtgcgatctcggctcactgcaagctccgcctcccaggttcaagtgattctcccgcctcagcctcccgagtagctgggactacaggcgcctgccaccacacccagctaattttttgtctttttagtagagacggggtttcactgtgttagccaggatggtctcgatctcctgacctcgtgatctgcccaccttggcctcccaatgtgctggaattgcaggtgtgagccaccatgcccggcctgttctttcttttttactggggtgcagaaagaaacaagactcaagggcttgtcaaaacttctatgcatgtgaaatgatagaagttcacttaacaagaagcggcagtgaccaaatgactcagcacccgatttccaccgcatggtctcttgaacagccgcgagaagactaaagccttctaagcacttccggtggaaggatgggccacaggccagcaacatgggcaggacctgggagcatgttagatgtgcagaatctcaagccccatcccagacctactggatcagcatctgcatgctaagcaggtgatcatgcacatgttaaagtgtaagaagccctgctctaactgccccatcccgtggtgcaatgaggctcggtgtccccacagagcagtcagcaagccaaggtatagttatgggaagactcatgccaggtaggactgcggagctggggtgagtgacatgggcacaggcctctgcagaagcttagctctggttcccctagcagcagcagctcaatttggagggactgaaggggagggggtattggatggtggtgtttctgtttcactttactgtcccactgacactagcactggcgggagagattttctctataatctgctgaaacctgagaaggaatctgcaagaataaacagagcctttagagcttaccaattctgatatttggaggcctttgcaaggtttaattcaatttattatttattgatgacctaccgtgtgccagatatcaggaatacaaagagaataaaatgtcctagtgttgtattgggaagggagggtcacattcttgcatgtgtctgtgtttggagatgagatgagtcgggggcaaacctgcagcaatagagcaactgcatgcccagtgtcacctgggtcccgaggggcaggacgaaaaacaggttaaggaaggcttcctggaagaggtggctcctaagctgttaagtaggctaagaaatgctctgtgcatgagctaacccattccatacactcaccacacacactcactcacatgcactcacacacaaactcccacccacacacatccacatccacacacacactcacatgcatgtatatctactccatccacacacacactcacatgcactcacatacaatctcccacccacactcacaatccgcatccacacacacactcacagcatgtatacgtactccatccacacacacatataggcacattcacacccacccacatatgtgcacatgcacctacacacacacacaccacacattgtagtctttctggggaaacagagaaagtcactcttttgaagaacctcagaaactgcacaataagagctcttcttaatttgccaccaaaactcagataaagttgaaggtctaacttccaagaagatcttctagactgttttccagattgttataaatgcaccttcagacatgaaggagcacctcacggttgcactcagatacctcctgggatgtgatttagtcttgatgattatcgttacatgtcactgaatatagtttgatgaaaacgttttagggaaacaagttttcagaaactgtccccagatttattatagtagtcgtcaactctgaggatgcattttttgactgggcaactattgttgggggtcttatacctgacttggagaggtgtgtttgtgccttttaggtaagatggggaatagagggtccccagacttaagagctatgtgtgatatttgagataaattgatccttaacatttttcccaagtcagagttctcattatttgtctcctagatgccaatagagtaaaatgcaaaatggctcaccacatggtcaaagcccctccctttcaactggccacatcctggctttcccatgctctttctactgaaccaagctctgtgttccaagaaatcaccctgtcctcaaatctctgtaccttgttctctgccgaagccatgcccaagcagttccctttgcctggtatgtttcgctctcccatttccccgcaatactgcctgtcaacctcttcaatgagaagttccagccccaccttctagaagcttccagaagccagtattgggctttggcattaaacagcctgtaacaaggaatgatcctgccccaaatgtcgctagtgccaggttgagtcactctgtcattgacagggtagactctgagtatgtgggtccttttgagcccgttttctaatctttaaaaaaagagggaggggaaaatatttacttcacacttttatttagtttttcaaagattaaatgagataatgctagtgagtttcactagcatataggagatagtcaagaaatatttcagtggataatggcatttctctcctgatcaagttggattaaccctctcttttctacagtctggaacgttctgtaccttacatagctgccttggatctgaggtttctgtgtttgtgaggcgggcttatcttggtctcttgcctggtgactttagcataatccttgctcaaaacgttaaattaaatgaaatagattctttgggtatcactctttttttctgcgaaattccttctaacagccgctgagcctgaagacaacaaaagctgcccagacttttctcctgggctccagcccctcctgtctgcctgctcaaaggaatctcagcgcgcaggtctcacaggcacctcaaatccagcctgtgtaaacctgagctgcctgtgtacacactcctatatcctagaaccatggttctcaaatgtgggtgtttttgccccccaggttacatttggcagggtctggggatatttttgtttgtcacaactaagacagatggtccttcgtggagtcttgtagacagaggtcgggggtgctgctgaacatcccacaatgcataggacagtctccattacaaggaatgatcctgccccaggtgtcactagtgccgggttgagaaatcctgatctagagggagactttacctggtaggtcaggccatggtaccgctctgctcacaatcccccatggctcccacatcactcagagtaagatgcataccctccgggtggaggacacggcctgcagggttccacttcccaacctgctgagccccgacttatcatcgccctctctccctttcctccaccccttctcctctttcctgccttgcttgtctgccctgcctcccaccgtgcctccactacgcctgcctcagagcctcgcaccaacgttccctctgcttggaatgctcttccctcagtcacccaagttcatcccttgctgccttcaagtctctgctcacatgtcacctttcctgcaaggccatgcctgcccaccccttttaaagccgcagcccttccaggcatgccatccttcttgcttgctataggtttttccattgcactgatcaccttacaaatgggtttatttattgtataattttctcttcccactagagtgtaagagctacaggaaagggatatttttgttttgttcactgatatttcccactgcctagtgctcaaaaaatatttgctgaataagtgaataaatcagtatcatactgtccccaacttgctcatcttacctctattttgtaactgatctatgtaaccaccacttagctgacatcctagtgtcagaacccaaacttgagtcttccctttctctgtcttttttattttttgagatggggtctcacttctcactatgttgcctaggctggacttgaactcctgggctcgggcgatcctcccacctcagcctcccaagtagctgggactataggtaggcaccattgcacccagcttctctctttcacagctttattgagatataattcacataaaatagaatttatccatttaaagagtacaattcaatgggttttggtatatcatagttacgcaaacaacactgcaacaatctttgaatattttctttctttctttttttttttttttttttgagacagcttcttgctctgtcacccaggctgcagtgcactggcgcaatctcggctcactgcaacctccgcctctcaggctcaaacgattctcctgcctcagcctcctgagtagctgggattacagacacatgcaactacacccagctaattttttgtattttcagtagagatgggatttcactatgttagctaggctggtctctaactcctgagctcaggtgatctgcctgcctcggcctcccaaagtgctaggattacaggcacgagccattgtgcccagcccaaatattttcattatcctcgaagaaaccccatattccttaaacatcgccctccagctcccccacccccaccgccatttctcctcatctctggcaactactgatctatgtgctgactccatgggttctcctgttctggacatttcatgtcaatggactcatacaacattcttcactggcttctttgacttagcacactgtgttccaggttcatccatgtttttgcctatattagtattgcattatttttatagccaaatactattccattgcatacaggcacagcattctgtttatccatgtatcacttgatgggcatttgggttacttccagtttggggctactataaaaatgctgctttgggctgggcgcagtggctcacacctgtaatcccagaactttgggagtctgaggtgggcggatcacttgaagccagaagttcaagaccagcctggctaacatggtgaaaccctgtctttactagaaatacaaaaattagctgggtgtggtggtgcgtgcctgtaattccagctactcaggaggctgaggcacaagaatcacttgaggttgcagtgagcggagatcagaccactgaactccagcctgggtgacagagccagactctgtccccctgcctcaaaaaaaaaaaaaagaaaagaaaagaaaaaaaaccgctgctctgaacatgcttgtccatgttcttgggtggacatatgctttcatttctcctgggcatgaacctgggagtggggctgctggatcatctggttactctgtgtgtaaccttttgaggacctgccacttttttttttttcgttttctctatgaatccacatccaactcataagtatgggctgtgtttctccctcctgaatctgtgctcacttgcatctgcacggaaaccacctcttcagttcatacctggaaggctacagtgcctgctaatggggatccctctccacttggtcaccctcgcctgcacaggggaaggagtttccccttcttgatgctgaggccacaccccggcccattcagggttgcctctggaggtgggacccaggcatcagtgcttcccagagctccccgggtgattacgacgcacagccaagcacccgcttccttctgatccacattttatcacctgccacccaagtgcctccatgacagcaaatctgattgtgtgatctggattcttcttaaaacccctgtgtggctctccacggtctccacaataaaatccaagctccccaggatgcacatgcatctcggtgacctgtgtccactgccacccgtcttgcctccttcctctccctgacccacgctgcacatgccacgctgagctccatgtgcctgcccatccacacctccacgccttgggacagactggtccctcttcctgaagtgcctgttcccatctttcatcctcctctaggaagtcttccctgactgctctccctcagcgggctgtaactgtgttcactggcctctagtccaggagcgcctcaaggccagggctgggatatcactcttctctggatcctcagcctgtagctgcctgactcatggtaggtgatgggttctttcttttttttggcatatgtatgttgggtggtgtgatgaatgaagaggtgagtgaatgaacctggcctatgtaggagccgtgaccaggtgcaatcctaccagctgcccaactgtgctctcctgagtcctagcaataaccctgggggcactcagcagggcctgctcaacccccgacctggaccagcgagacccatgcacgtctccctcccgtggggacatctacctgcatttcccagtctcaggctcagtgtgtttcatttctccagccatggggcccagcaggtgtcagcagcaaagcagaactgggtgggacagtccttcctgaagataaggcaaagtgccccagcccagagatcaatcctgtaaatccactttcaaagggctgaataaggtgggacatccctggttccttcttcagccataaatctctaggctcagatggtaactgccctcctcttgacaaagctgtaaagagcacggcatagcagcagtcgggaaagagcatggacaagaaaggtccttcgggtggggcaaggcccacctgtcttgccccctaagctttgcctccctccctgcatgggctttgctgtctctgtggggacctgttggaggttgcagggcttgactgccagtgccggaggcttctgtgagcatctgtcctgtaaatacccaggctccattctgctgctcagcccatgccgatgccacctgacttcctgtgaatgaatggagcactgtaaaaggagtccagctcggctgccccccatgtgactgtctaagagtcacctcccctctcgaggaggcagtggggtgggtggactagatgatcccagaggctgctttcagctctaacgccccagttgctcctgttttttgttttttgtttttgagacggagtctcgctctgtcgcccaggctggagtgcagtggtgcaatctcggctcactgcaaacttcacctctctggttcacaccattctcctgcctcagcctcctgagtagctgggactacaggcgcccgccaccacgcccggctaattttttgtgtttttagtacagacggggtttcaccgtgttagccaggatggtctcaatcttctgaccttatgatccgcctgcctcggcctccaaaagtgctgggattacaggtgtgagccaccacgcccggcctcctggttttttttagacagagtctctctctgtcgccaggctggagtgcaatggcccgatcttggctcactgcaacctttgcctcctgggtccaagtgattctcctgcctcagcctcctgagtaagtggtattacaggtgcccaccaccatgcccagataattttttgtatttttagtagagttcaagttggccaggctggtcttgagctcctgccctcaagtgatccacctgccctggcctcccaaagtgccagttgctctttctgacccgtttgagagcaaagctgtgtgaaggttttcctctcaggtcctgaattttcaagaaaatcatgtttggaaagaccagagtcaagcatagtaaaaaataacaaacttgaaaataatgactctttgtgttttgatttctcctaaatccggcttctgtaactgtacagtaacagggcagtgcagggaacagcaccggacaagagagtctccaaatccttaattccattctgccccgccccggactagcagtgtcattggggtgagtcatttttccctctgtaggcctcagtttgctgatctgtaaaatggggatatttaatgccttacagagagcttgccatgtgccttctccagtactaagtagagagacaggtaaataagacaggatcctaacttttttttttttttttgagatggagtctcgctctgacccccaggctgaagtgcagtggcatgatcgcggctaactgtaagctccacctcccgggttcaagccattctcctgcctcagcctcccgagtagctgggactacaggtgcccaccaccatgcccggctaatttttctgtatttttagtagagacggggtttcaccatgttagccaggatggtcttgatctcctgaccctgtgatccgcctgccttggcttcccaaagtgctgggattacaggcgtgagccgccgcgccagcctaattttttttcaaaattttggttttgctttaggagaattgcttgaacctgagaggtggaggttgcagtgagccaagattgcatcagtgcactccagcccaggcaacagtgcaagactatgtcaaaaaaagaaagaaagaaaaaggaaggaaggaagaaaggaaggaaggaaggaaggaaagaaggaaggcaggcaggcagtcaggcaggcaagcagcttatttgggaggtgatccccggaaacactggcagagagagaagtcaggtagggaagtgaaagcagtcaatacagagtgcaatttcaagccagctaccattatgagcttcatcccaataaggagctcaacaactctatccaatgacttctctctcctttcccacaaaacatctgtgaccagacacttggcttaacctccacatttctctgcatctttatatagcttctcctccttttatgataactcagaggagcagatatccccttcctctgaacaaatgcctccacttcaactcttcatctactccctttctacccctccaaaaccttgctccgccagaggccccctgcctttctctactcccgctccctcttcatcctcattccttgataacactttgcaacctgactttcatttccccttcttcctcccatgcactgaggcttgggggctttactaagatgcttttcccagaggatccttcctcgagtttccgatacacgtctatccaccttgtttcataaacagtctattattattcactgctaaaaaactctcatctcaaaatgttaaggatcatcatagctacataacaaagttgtggtaaggattcgaggttaaatacactgtctagcagagcctggcacaaagaggcagtcagtacacagcagcaaccaataccatcaccaagcttaattattggagtttgcaacccatgggtgatcaggacagaatatgacaagaaggagagctgttagaggcagaagagtagtagtttgggatcattttacagaactgcaggaagtcagtgtcaccagagttcttgagatttcccagtctcttggacattggtggtgatgggcgttcttaaggatgacgactgtagttagaagagctagttccacaatcatcacaacagtttttccctcttaaatagaaagtgctggttttccatgtcaatactaaatgttcagtaacaactggctgcagttgacattcccaagcaaaagcaggggtcaagccctatccagtagaggaaccaaagcagaaccagccttgcgtggttggtcatccggccactgaactttctgccacaaagtcaaagaggtttgggactagcacgagaatagaacagcagtgggatgagtagacaagggagcccacacacagacccgcaggaatgtacaaatgaagtacatgggcaccgaggcatttcaaagccgtgaggagaggatgtcttgattattaaatcaatggtgcagggatgattgactaagggcttggaaaggcataaagttcccgtctgtgcctcacatcccatgtccaaataagattcaacgtctaaagagttacacatcaatcaaccagaaattggaaaacaagtgcctggcttatttcacttagcataatgtcctccaggtccatccatgtggttgcaaatggcaagattcccttcttttttagggctgaatggtattttcttgtatgtatacaccaccatttcaataaagaattggttaagtgattgtatattgatacaatggacttttatatagtcatgaaagtcatgttttagaatagtcaatgctcatgatctattcttaagtaaaatagtaagctaaaaaaacatatagctccaggagttgagcaagagaggcaccctgcctgctgggcctgtctgctcccctgagttaggcactccaggaaggggttgagagcatctgagtcttggggcccagccctgaggccctcactttccctgcctactaaggggccctcaggaacaaaagcagagccaaggagttgtacagctatagagtccagtgtgctcagcccctcaagtgtgtgatggaaataggcccagagaggtcaggtgacctgcccagggccttccagccctcacacagctggaatcaggatccacggcccccagcctggagcactggacatcacatttcaggggaagtggggtgctgggctcacacgtgagaggtcttgctagctgccagcctggggctcacccgcctgctgtccaccccttcaacatcggtagtgggactcacaggcacgaggctggggccttctgctgcagacacaaagcataccgccacctgaggtccagggtcatgattcaaaacctactaagtgcccatcagtcctttcccaggttgaagggaaaacaggactccagcccccacatagtgcctggccacctgctgctcatgaggccttgtctccccatctttaggaaggctttgtgtgtgtgaaagtttttgcatgcacttgtcttaagcatcttcacggccctgcaaggtgggtttgattgtcatccccatcttacaggtgaaacaggtttccagagtctgagtagtttgccaaggcggggaaggggtgatccaggactcaaacccaggtcctccaactgccactttctctgactttctgggggtcagtaaccccagtcccttctctcctagcctgtcagagattcagcagagaccccaggtggaggctcagtgagctctggtgtgtgatagggacctggggtcttgtcactgtcctgacaccttatcctctaggtggctttgaaaccatccgtgtcactttgggcttcaccagagttgccaatcccagcctcaaaattcagccaccccaccccaacctctgggggctgaggcaaagactcttcttttctccacaaagctagaatgaggaccttctgggggcctaaggtaagaaatggtctatttctaaagggcctggtgtctgggtaagctctgtgtattttcttacgtttgctttttggggaacttcattcagaggagacttggcagcctctctgaagacacggaagtgatcaatggcaaagctgcaagaggctgtaagccccacctagcatgacttcctcattaggcacatggggaaactgagcctcagtgggtggaacaggcctgcaggggcacagttgggacaagaactccgaactccagggccctctacagctcaggctgtgcaaatggggctggtcccgaaagacggtccgggctgatgtggggactgtcaggctgtgagacggggctcactggccagccagcccagaggcagcgtaggcgctctggcaggagaccccccccaggaagtttcgaaaccttcagcaggatttcagaaccgttctagaccccatgcagattgtttctctgttaaagaaggcgctttaagaagctgccgaagaggctctgcctttgaccgtcaacaggcatctttcctctagtccatcagcccacaaagacaggaaatctgatggggggaaaaacaaataaagtcatgccaaagtcgggtgtcagtaaccaggggggccgcctgaggcgtcgcatccaacccccgcccaggtttccgccccgggccagcagtagccagtccccgagggcccatcttccagccctgaagcggtaaacgcctcacctctagtggcgagtgcgaggaaccgcaccctagcccgcctgactgtccagccccgggtggtgcccatcctgcctgttgttccctctcaaaccaaataaacctcccgacgtatggactctggctgtcgtagatgcagactctcctgcaatgcttaacaccgttttgctaccacgtgacggctgcagacactgtcctcaaactgcagccccacaacgcaatttttgtactttcatctgacatacccgaaggtgtcctttttaagtcttgttaatattcataatgacgtataatccaaagtaaatggaaatgtcatattgtgattgcaatggaaacggcatattgcgactgcattgccttggcgagactgtcgtcctaacagattttgagggggcggggatggtggctcacgcctgtaatctcagcactttgggaagccaagttgggaggttcacttgaaaccaggagttcgagcccagcctggccaacatggagaaacccgtctgtacaaaaaaaacagaaaacaaacaaaaaaaaacacaaaaccaattagccgggtgtggtggcacgcacctgtagtcccagctgcattagaactgaagatggctccccatctcatacacggtgaaagccagtctttatcaagttctacatgtagctggtgcagtgtttcacacctgtaatcccagcactcagcactttgggaggctgtggtgggtttcacttgagcctgggagatagaggctgcagtgaaccgagatcactgcattccagcctgggtgacagagtgagaccctgtcttaacaaaagagacttggaggggctggaggggaaggtggaaaggcagaggaaaaggcaactggaacttagggtatggtcttgttactcttcaccaggaaccatttgaggtaggcccccaagttacagatggggaaactgaggcccagagaggttaaaatacttgtgcagaatcacacagctggctgatgacagaagcacgacgcaaactgaggcctcccaagactttctgcaccaggaccagccagccatgctgttacctactcattcaacaaacagctgtggagtattgactctaacgtcagtccctgcctgggcccctgagagacagtcatcagggagatcatctatgaagacacaataatggtatgttagaaggtgaccagtagcaaaaactatgagcataaaggaactgggtgggcaggcaaggttatgcttaataggcaggtcgggcgggcctcaaggtaagtgttgagctaagacttggaggggcggaagggagcaatggggacacctggggaaaaggttctgaaggcagagccatgcttggcatgactgaggaaaagcaaagtggccaatgtggccagagcaggatggggcaagggaagaacaatggatgggggcagaggatcggacccaagtcatgtagaaacttttttttttttttgagacaggttctcattgtatctcccaggctggagtgcagtggtgtgatcatggctcactgcggccttgacctcctgctttagcctcctgagtagatgagactaggcatgtgtcatcatgcctggctattcttttaatttttatttcgcagagatggggttttgctatgttacccaggctggccttgaactcctgggctcgtgcaatcccaccacagcctcctaaagtgctgagtgctgggattacaggcgtgaaccactgcaccagctacatgtagaactttataaagactgttgctttcactatgcgtgagatgggaagccgtcttgagttctaaaagacgcccagtagaagacaaacctgtcatctggggcaggtcagcaggcccaggttgaaggtccctctgttgggggcctgccagagggtctggccttcaaggcccaaatggcatccagtatccagggtggcggcagctcggtccccaccagatccctctgcagcatgactccgctgaaggttctggctgccgactcccttaggaagcccctgtgtgctggcccaactctccaggcctccagctcattctctgaaccacctgacaccccttcccatgcattccttttctgcttatgttaaccagagtgggatactgttgtttgtgacaaacagccccgcttggtactctgacgtgatctatcgtccaggtctcaactcaagtgcccctgtgaggcctgccctgccaaccccaggcacttccacatctccctgctttctgttcttcagggcgttcatcaccaaaagcatcttgtgtagttatttcttcctttctctcaccactaaccttcatgagagtaggggccatacccaccattacccccagtaaccccagggcctacaccaaggctgagggaacaggagcctgctaatgagtatttgttgaacaaatgggtaaaagctgctgatgtggacgttttatgaaaggagtcgaagccatgtgtctagagcgtcagttctgatgatgttgggtccaagcccagatgtgcgtgtgcaagagcctcggttcagctccagaagactcctggggtacagatgagaaaggaccccagggaccactggcttatcctgaacagaaaaagggagagaggaggccaggcgcagtggctcacgcctataatcccagcactttaagaggccaagacaggagaataatttgagcccaggagttcaagaagagcctgggcaacatatcgaggttgcatctctacaaaaaattaaaaaaatagaaattagcaaagcctggtagcacatgcctgtggtcccagctactctgaaggctgaggcgggaggatcacttgagcctgggaattcaaggctgcaacgagctatgatcgcaccactgcactccagcctgggagatagaatgagacgccgtctcaaaaacagaaaaaagaaacagccttattgaggaataactgatatgcacagaactgcacgtggttaatgtgtacaatttggtaagtctggacatttgcaaacacccatgatactgtcactaccctgagggaatagacatagccaacacctccccaagtttccttgtgtctctttggttttggttttgttttgggttttcccgtgtgtggtaacaacacaacaagagacctacccacttaacagattttgaaatgtacagcattgttattcataggccctgtgttgtacagcagatctctagaacgtattcctctagcataactgaaactttacacccatggaaaaactccccgttttgcccaccctccagcccctgctaaccactattgtatacactgcttctgtgagtttcactgttgtagatacctcataaaaatggaaccatgcggccgggcgcggtggctcacgcctgtaatcctagcactttgtgattgggaggccgaggtgggcagatcacgaggtcaggagatcaagaccatcttggctaacacgatgaaaccccatctctactaaaaatacaaaaaattagccggacgtggtggcgggcacctgaagtcccagctactcaagaggctgaggcaggagaatggcgtgaaccggggaggcggagcttgcagtgagccaagatcgcgccactgcactccagcctgggcgacagagcgagactccgtctcaaaaaaagaaaaaaaggaaccatgcagtatttgtccttctgtgcctggcttattgcacttggcataatgtcctccaggtccatccatgtagctgcaaaaggcaagattcccttctttttttggggttgaatgttattgtcttgtatgtctctaccaccatttctttacccattaatctgtaactgacgcttgagttgtcacaacacactttctaggctgatccatcagtacatgggtgatgcaaaatggtagcctccggtcacaatagctgacatctttgattccagcactttgggagactgaagcaggtggatcagttgagcccaggagttcacgatcagcctgggcaatacggcaaaaccgcgtctctacgaaaaatacaaaaaactagccgggtatggtggcatccacctttggtaccagctactcaggaggctgaggtaggaggaccgcttgagtctgggggacagaggctgcagtgagccgatagcgcaccactgtactccagcctgggcaacggagtgagatcctgtctcaaaaattacactacaatacactacactacactacactacactacactacactacaatactaaaataaaataaaataaaataaaataaaataaaataaataaaataaaataataaaataaaataaaataaaatcggtggcctcaaccccaagtgtgagtggcttttcagtttggctctccagggctgctcaggagcatttcctgtatctcttaatttagcttctcaggagagaaatgacagcacaagttatgactcatctccttaagtcaagtgtcagtgatgtggtgacatcacatggtaaaaccatggctatgggcaaggcacacaaagccagacgtgtctttcccaggaagtccctgacccagtgggaaaggaagaagggagaggtggcagccaatggaaagaaggggcaggagccaagcagggccacaggacccgaagcagaaatgattcagaaagcaaagactaataaacagccaatagcaagacacttaaaaaaaaaaaaagagagaaatgacctacatgaccaagaaagggtgaataaatttcactatggccatctgaaggctagaaagttatgcagccattgctgtttaatgatgaataatggtgtggtatcttgcaaatgtgtagggaacacagaaggatgaaaattgagtttagactgagttctttttcttttctttgagacaaggtcttgctctgttgcccaggctggagtgcagtgatgcaatcatagcttatttcaagcttgaattccttggattcaggcgatcctcctgcctcggcgccccacccagagtagctgggaccacaagtgtgcaccaccatgcctggctgagttttattttactttttgtaaagatgggatctcactatgttgcccaagctggtctcaaattcctggattcaaaccattctccctccaccatgagccaccgccctggtgtgatcagtgatgtggagcttcttttcatgtgtgcttgtcttctttggggaaatgtctaagccttttgcccagttttgaattggcttccttgtttttgtaattgttgagttgtaggagtttttttaatatgttctagatattaatccctcattatacatacaatttgcaaatatcttctctcattctgtcagttgtcttttcacactttttttggtcttttcttttgagatagggtctcactctgtcacccatgttggagtgcggtggtgtaatcatggctcactgcagcctcgacctcttgggctcaagtggtcctcccacctcagcctcccaagtagctgggactacaggcacatgccaccatgcccagctaattttttattttttatttttttttatttatagagatgggggtctccctgtgttgcccaggctggtctcaaaactcctgggaacaactgatcttcccaccttggcattccaaaatgctgggatttacaggcatgagccaccacacctggcctcttgtcactctcttcatagtgttttttgatgaaagttcttcaactgatgaagatcaatttatctattttcttgtgttgcctgtgctttgggtgttatatccaagaaaacattgctgaatcccatgttttcaagggtttcccctatgttttcttctaagagtttcatgattttagctcctatgtttttgatccattttgagttaaatttatatatggtgtatggtaagagtcctacttcattcttttacatatactcagttttctcagcactgtttattgaaaagattgtttttccccccattaaatggtcttggcacatctctctttcctttctttcttttcttttctctgtctatttcctccctccctcccttccttccttctctctttccttctctctttctctgtctttctatctctctctctctctctctcgtctcactttgtcacccgggctgaagtacagtggagtgatcttggctcactgcaacctcaactctctctctttctttctcaagagtctcactctgtcacccaggctggagtgcagtggaataatctcggctcactgcaacttgaaccttccagcttcaagtgattctcgtgcctcagcttctcgagtatctaggattacaggcatgcgccgccacgcctggctaatttttgtatttttggtaaagacaaggttttgccatattggccagggtggtctcaaactcctgaccacaagtgatcctcctgcctcagcctcccaaagtattaggattactggtgtgagccactgtgcccagcacatcttggcacccttttcaaaactcaactgaccactgacgtgagggtttgtttctgggccctctatttcaccccattgatctagatatctgtccttatgctagtatcacagtttttggtttttcttttcctttttttttttttttgaaacagagtctcactctgtcacccaggctggaatgcagcggcgtgatcttggctcactacaacctctgcctcctgggttcaagtgactctcctgcctcagcctcccgagtagctggaattacaggtgcacgccaccatgcccagctattttgtatttgtaatagagatggagtttcaccatgttggccaggctggtctcgaactcctgacctcaagagatgcacccacctgggcctcccaaagtgctgggattacaggtgtgagccactgcacccagcctgttttgtttttttgagacaggagtctcactgttgcccaggtagagtgcagtggcatgatctcagctcactgaaagctctgcctcccgggttcacgccattctcctgcctcagcctcctgactagctgggactacaggtgcccaccaccacgcctggcaaatttttttgtatttttagtagaaacgaggtttcactgtgttagccaggatggtctcgatctcctgaccttgtgatccacctgccttggcctcccaaagtgctgggattacaggcgtgagccactacgcccggccaagttctccaactcttcttctttttcacaattgttttgattattcagggagggtgccttgaaattccctatgaggtttagaacgagttttctatttcagaaagaaaatcaaacatgccattggaatattcagaacgattacattgaatctgtagattgctttggatagtcttgacacatcataataatattaagtcttccttcataaacataggatgtctttcatttatttatgtcttctttaattactttcagcaaggttttatcattttcagtgtgtgagtctttcaccttcttggataaatttattgtaaagtgccttattctttttgatgctattacaatgattttcttttctctggactgtttattgctatcgtatataaatgcaactgatttttgcgctttgctgaattggtttatttgctctaacaattttttgtagaatctttatggttctctacatagaaaatcaatgggcaaacagagataatttttcttcttggccaggtgcagtggctcatgcctataatcccagcactttgggaggtgaggtcaagctgatagcttcagtccaggagttcgagaccagcctggccaacacagtgaaaccccatctactaaaaatacaaaaaaaaaaaatcagccaggtgaggtggcacgcacctgtagtaccagctacttgggaggctgaggcagaagaatcgcttgaacccaggaggcagaggttgcagtgagccgagatcgcaccactgcactccagcctgggagacagagtgagactccatctcaaaaagaaaaaaacaaaaagcaatatcaacaaagcaaaatgacagcctaccaaacaggagaaaatactcacaaagagattactatctgggatagataaagaactccaaacactcaaacaaaaaaacaaattcaaaaatgggcaaaaaggccaggtgcagtggctcatacctgtagtgccagcattttgggaggctgaggcaggaggatcactttgggccaggagttcaagaccagcctagacaacatagcgagaccctgcctctacaaaaaaaaattaaaaatgagccaggcatggtggcacgagcctctagtgccagctacttgggaggctcaggcaggagaatcacctgagtccaggaagttaaggctgcagtgagctatgattgcaccactgcaaggacagaataagatcctgtgtcttaaaagaaagtaattatctgttccacttccactcccaggtggaattgaaacaagaactcaagcaaatagtgcaccaatgttcatagcaccattagtcacacaataggaaaaggtgaaaagaaactcactgtccatcaaaagttcaatggctaaacgatgtgtgaaaaatacataaaatggattattattcagtcataaaaaggactgaagctctgatccacgcttaatattaacaaaacattgaaagcattatgctaactgaaataaagacagccacaaggcacaaatattatatgatccctcttctatgaggtatctaaaatgggccaattcatagggacaaagtaaaatagaggttactggcagctggggagggggaaatgaagagttattgtttaatggctatagtttgttttgtgtgagtgaagaaaaagttttcacatagtggtggtgtttacacaacactattgatgtacttggtgccactgaactgtacatttcaaaatggctataatgataaactttatgtatattttgtcacaactttttaaaagtaaaaagttatatacatataaatattccttaaatttgtatctacattatcaaaaactgggaacaagctgaagtataaaagggggaacaatttaacacacatcagtaagaatgaaacttgtttatgctaaaacagaaaatataaaatgatgtttgctaggagaataactattaaaaacatgcccacaaagactgaacactaatatacaaaaattaagataattctattataattttctctcatttccttcctctagttatattaacatgttagatttcttttcagtctactaacaacaacaatatgccacatcaaaataattatcctgactgctaagctactgggttgagataggtctgttttaatacaaagcagcttcaactaagagcctaggaattactacgcagccaggcctacaaaggcagtcccaagaaacaagacggaacactcaaatggctatccttcttcactttcacactgacagcttgtgttcttccccacatcttacctgaaggcagggtcagggaaattcagaatttcacaggagaatatggaaaaattgagagcaagacataaatgaatgggatgcattggtgaaagttctcttactgcaatatcactagcagctttgtaagccaccaagctgttctctgccacctccttcctgtcatttcctgtggcaaattctgccagatacctgtggtagacccctttcctacagcaaaattaaaaaaaaaaattaaaccaggaacaatgatttttaaagtaaaagagctaaaattgttctatataatataaaatatgtgacaaaaaatatacgtaacaattaacaagtgtacttcaataattttaaacactcaggaatatttggcttcatttcatttttttcttagacatttcatactattttccttattaaatgtaaccaaaaatcccacagagattaactgaggagcctctaaatatcagcaaaactatcgcttgatagactagaattaaacaagcaagtggttccaagaaatggcacaagtgtattaatcataaaataaaatttctacatgaaacattcagccagcactgtgcaatatgtggccatttaggggaggggaatgagataggtcccatgaaagcaaaacaatataaataagtaaagcaaaagctaatgcatttttataatagcctgaccatctttttattccaacatcaactatccttctaacattaaacaattatttgtaaataaaagttggaaacctacatagaagaaagtcatgattctaaaaaggccaacttttaatcttacattttcctttctagtatagaacctacatttcataatagaaaaccttggacttgccagtggtagctgctggaatgaggtgtttgtccagtgcatccagaacatcgccgcagattaactttagctcagtctcaacctgaaaaaataaagataaattttaaaaaatcagactgtttcagtctagaaattctgtaaatttattacacattctatctacctctggttttgaggaagagagcttagtgttacagagaattcatttccctctccaaactcccttcctcccttttgacacaaaagcagagaaaagctgcctgtcggttatcaaaagtatcttttccttcctgcctgcaattaagtgctacacacacaccaccccccaccccaataccccctcacagtccaactgcagaatcaccaatgactgaaactaaacactgatgctacttggtaaacgctggtcaattacatgaatctttcacaaggtagcaactattgtatccatttactgggaaagcagaacctaagacatttgctcaaagatcatcaccttaaaagaacttaataagcagagctaggatttgaaaccaggcagggtgcaagggacagaacaaaattcaaacccaggcaatttgccttcagtacttacattcctaacaacgttgaacaggcaatccctttagtggaagagaccaaaactagttaagataccaaaaatctatggaccaaaaaaactactgccactcatctctattcatttataatgctgaaaatgtacagcacctctaaacgcacatacccagcttgcttccttttttttttttttttttgagacggagttttgctttgtccctcaggctggagtgcaatggcaccatctcagcttactgcaagctctgcctcccgggttcacaccattctcctgcctcagcctcccgagtagctgggactacaggcgccaccaccatgcccggctattttttttttttttttttttgtatttttagtagagacagggtttcaccatgttagccaagatggcctcgatctcctgtccccgtgatcctcccacctcggcctcccaaagtgctgagattacaggcatgagccactgcacccagcctgggttttttttttttttttttttttgagacaggagtctcactctgctgcccaggctagagtgcagtggcgtgatttcatatatgatgtttattctaataacagcaaaagggggaagagggcaatggagctttacaggagaaaactgctttctgcaagtctttatctttttgcaggtaaaaagtcctgcctcagtgttgatggcttctgactcactgaggtggtggttgtggcactttcacttcactgtttttgttttgttttgttttgtttttagtagagacaaggtcttgctttgttgccctgggtggtctcaaactcctggcttcaagcaatcctactgtctttgaaaaggttgtgattaatgaacttccagcccttttttaaaataacaataaaagtggctacatcaattgactcttcctttcataaaacactgctctgtagcatgtgctgctgtttgacagcattttacctacagtaaaactctcttcaaaattggggccaattctctgaaaccttgctgccactttatcaactaagtatagggcatattctacatcctttgttgtcatttcaacaatgtttacaccatcttcacaggaaatagattccatctcaggaaagcactttctttgttcatctatgagaagacattctttcaagtttgaccatgagattgcagcaattcagtcacatcttcaggctccacttctaattctagctctcttgctactggccaccacatctgcagcctccatcaaagtcttgaatctctcagtcatccatgaaggacagaatcaacttcttttcaaattcccgttcatgttgatattttgacctcctcccataaaacacaaatgttcttaatggtacctagaatggtgaattctttccagaaagttttcaatgtactttgcccagatccatcagaggaatcaccctctatatagcagccatagcctttcaaaatgtatttcttaaataataagacttttatatcaaattgtctcctggatccacggactgcaggatggatgttgtgttagcaggcacgaaaagaacattttcttatacatcttcatcagagctcctaggtgactatgtgcattgtcaaagggttactaattggcctacattcaatattgctgtgtcttaaggaatagggaggcctgaggagagtagagagagatgagggaacagccagctagtacagcagtcagaacacttacaacatttattaacttcacctcatagtaatatcaaaggtcactgatcatacataaccataacagatataataatgaaaatgtgtgaaatattatgagaattttaaaaagggacaaagagccactaagtgagcacatgctgttggaaaaatgaaactgatagacttgcttactccagggttgccacaaaccttcaatttggtaaaaaaaaaaaaaaaaccatgcaattcctgtcaagtacaataaataggagcccaataaaatgagatatgcttaagaaaaaaaagatatgcttatacatcttactacaattaagtacagtctagcaagataaagatagtaagccctacaacaaccactaagaaaataacccaagaaaaatcgttttaaaaatcataaagaaggccaggccagtgagccaaacacctgtacttcccagcactttgggagactgaagcaggaggatagcttgagcccaggagtttgacaccagcctgggcaacataacccgtcactgcaaacaagaaaaaacttaggcatgatggcatgttgttgcgggaattcagggaccccgaacggagggaccggctgaagccatggcagaagaacataaattgtgaagatttcatggacatttattagttccccaaattaatacttttataatttcttacgcctgtctttactgcaatctctgaacataaattgtgaagatttaatggacatttatcacttccccaatcaatactcttgtgatttcctatgcctgtctttacttaatctcttaatcctgtcatcttcgtaaactgaggatgaatgttgcctcaggaccctgtgatggttgtgttaactgcacaaattgttggtagagcacgtgtgtttgaactgtatgaaatctgggcaccttgaaaaaagaacaggataacagcgatgttcagggaacaaaggagataaccttaaagtctggcggcctgtgggccgggcggaagagagccatatttctcttctttcaaaagcaaataggagaaatattgctgaattctttttctcagcaaggagcatccctgagaaagagaatgcattcctaaggggggggtctctaaaatggccgttttgggaacgtttgtcttttattgttgttgataagggatgaaataagccccagtcttccgcagcgctcccaggcttattaggacaaggaaattcccgccttataaattttggtcagactggttgtctgctctcaaaccctgtctcctgataagatgttatcaatgacaatgtgtgcccgaaacttcattagcaattttaatttcaccccggtcctgtgatctcgccctgcctccatttgccttgtgatattgtattaccttgtgaagcatgtgatgtctgtgacccacaccttattcgtacactccctccccttttgaaagtcactcataacaacttgctggttttgcagcttagggggcatcacggaacctgccgacatcggatgtctcccccggacacccagctttaaaatttctctcttttgtactgtttccctttatttctcagaccggctgacatttagggaaaatagaaaagaactcatgtgaaatatcatgggctgaatttcccctgacaacgtggcagtagtccctgctgcttgtgaggctgagcagggaggatcacttgaacctgggaggttgatgttgcagtgaccatgacagtgccactgcactccagacagggtgacagagcaagaccctatctcaaaaataaaataaaagggcagcggcagcaagacacaactcccagtcagccacaccatcatgagactaaacaaccaatgcttgcttgaccagtgaaccatgtagccagatgattttttcccaattgtaggctaatgtaagtgttctgagcatgtttaatgtaggctaggctaagccaaggtgttagataaataaggtatatttctttcttttctttttttaaagagatggggtctcactatattgcctaggctgcagtgaagtggctgttcacaggtgcaataatcacgcactaaagcctcaaaatcctgggctcaaataatcctcttgccttaccagaatgtaatctgctcataactcaagaagcatctgtacttaagattaaaaaggtagaaaaacaaaacaaaacaaaacaggaactaagtagtcataagaaaaaaaaaaagggcaggctgccaacccaggaccaaggggtaaggccatgccagtgggcctagagaacagaatatcaagccacagagaactattttcaagtctcagaactgaatggaattagtcctgcagacttataaacctgctttaagccctttttccttccaatttatctcttttggaatgggaatgcttctctgcctgtcccaccattgcatctcagaaacagataacttgttttctatgtatcacaggtttagaaatagaaggatttttttttctcttttttttaagacagagtctcactctggccacccaggctggagtgcaatggcgcaatctcagctcactgcaacctctgcctcccaggttcaagcagctctcctgcctcagcctcccgagtagctgggactacaggcatgtgccaccacacccggctactttttgtatttttagtagagacagggttttactgtgttagccaggctggtcttcaactcctgacctcaggtaagctgcctgcctcagcctcctaaagtgctgagattacaggcgtgagccaccatgcccagcagagatagaaattttgcttcaggattaaccaacgtcttaacccatcgccaattcagatgattcagaagttgagatttgggactttctgagtttattctattcaggtaagatgtgagacttacttatagagtttacatcaaaatagattaacacttttgggggatactgggatacagcacatctattctgtatgtggaaagaacacaaattctggggggaccagaaggcagactgctatgggttgaattgtggtccccaagaaatgtatgtgaagtccttaacccccagtatcttagagagtaacttcatttggaaaaaggatcattgcaaatgtaattaggatgaggtcacatgatggagtagggcaggcccctaatccaatatgactgatctcctaataagaagatggccatatggagacagagacaaaggaagaatggaatgtgaagacagaagcagagattagggtgattaaaaaaaaaaaaaaaacgtgccaatcattgacacccatcaccagaagctaggaggcatggaagagatttcccttaatagttctcagaaggatgcaacccagctgatatcttgacttcagacttgtagcctccttaatcgtgagaagaaatttctgctgctttaagccacccagtttgtgatattttgttacagcagccctaggaaactactacagggggtgtatgaagaattggctatgagctgttcatgttttagaatcggttgatgaatgtacgcagggtgtttgttatattgttgtttactgttttatatatttgacaatttcagaaataaattctttttttttttttttgagatggagtctcgctttgtggctcaggctggagtgcagtggtgtgatctcggctcactgcaagctccgcctcctgggttcacaccattctcctgcctcagcctcccaagtagctgggactataggcacccaccactatgcctggctaatttttttgtatttttagtagagacagagtttcaccatgttagccaggatggtctcgatctcctgaccttgtgatccgcccatcttggcctctcaaagtgctgggattacaggcgtgagccactgcgcctggctcagaaataaattcttaataaacaaaacaatgtcataataagtagagtaagtattaaagctttaaaaagcagaagcaaacaaattagaaaacagtggaataaagttggaaataggccccaaagctgttctttatatcaggtataaaagaaatcgatcaatgccagcacagcggctcgcacctgtaatcccagcactttcagaggccaaggtgggcaaatcacctgatatcaggaattcgagaccagcctggccaacatggtgaaaccccgcctctactaaaaatacaaaaaaaaaattagctgagtatggtggtagacacctataatcctagctactcgggaggctgagacaggagagtggcttgaactcgcggggaggaggttgtagtgagccaagattgcaccactgcactccagcctgggcaacagagtgagactccatctcaaaacaaaagaaaaaaattttttggttaagagtttagataaaggaaaaaactccatttaaatgtttgtgtgaagaaaaccataatggattacatggcacaacaacagtttcaaaaaattaaaaccaatttgtaaacattaatcatcacggttacttatatgcccttaaaaatgatctatatgctcctagtgtcacataagacacgttaatctaggagtctacttcactcagactttttgcaactaacatgcattctttgtttcttcatcactgtggggaagaggtggtacatacaaaaggttcttgacataaccctataaaaagatgatcacatggtgtattatctgggaatttaaatggtcacaattccaggatacgtcaatgctatcaactttaaaaaaaaaataaatttgacctataatgggggggccagcagggggtaggggagaaagaggcaaactgtgtatcctggaactttgtaactggaaaaaaattaccagcagcagcagcctgatcaaaactgcaacttcttgcccacctggacaacccagctctcttttctagaaattagcatctatgctcaatttctaataatggaatggtgcctaggtactcatgtttgtctaggtgaaaacagcttctaaatccaggtgcttacatcagaatggctctcctggaaatttaggactgagacattgagtcagttacctgtagggtaacctgtagaatcagagatttctcaaatttgacctgtcttattttgataccatgtttcccagcaatgtatcctccccttaagtatcagtttttgtaaaatctcctaatcaatttcttatcagattatattatataaatacctatcatctagagtactccagaagccaaatgaacattaaaaaaaaaatactgagatagggccaggcatagtggctgagtgtaataccagcattttgggaggctgagttggaaggataacttgaggccaggagttcatgaccagcctgggttatatagcaagacgctgtctctctaccaattctatcaatatttaaaaaaaaaaactgggtgtggtggtggcacctgtactcctagctacttgggagcctgaggtgggaggacggattgattgaggccaggagtttgaggctatcgtgaaccataatcgtccactgcagtccaccctggggtgatggactaataagactgtctctaaataaataaatattacaaaaagaaaagcactgagataggtaatgttggtaagtgagattatagattttaatctcatgaacaattttaagttagctactatacactcccatttccaaaagtttagattggaatgtttgctgcctttggtagctaagagaaaagaaataacaatgagggatattatagtgccattcttccacagtccttatcaaataaataggcctttgagtcttggaattgttgagagtaagaaagcaaataatatataaagttgacaagcacaaaagacacaaagaggccaggcatggtggctcaagcttgtaattccaacactttgggaggtcagggcaggggggttgtctgaatccaggagttcaagaccagcctaggcaacatagtgagatcccatctctacaaaaaataaaaacaaaagtagccagacatgaatggtgcatgcctgtagtcccagctactcaggaggctgaggtgggaggatcacttgaggctgggaggtcgaagctacagtgagctgtaattgcaccactgcactccagcctggggaacagtaagaccatgttggaaaaaaagaagaggggaggggaaggggaggagagaccacaagaaacaaatataatgaataatagtttactattcctgagaaaaagagaataccaaatgtgagagaatgtgtaactagggttggggagagcgggctggagagagagagcacgcaaagacaacagagagaagtcaaataggaaatttcaaaatgagaatcagctgatgtataaaaaaagagcaaaataatttttttaccgatagaactgcaagatttagctttccaaaatgattccattctccagaaaagaaaaattaatttaagcactcatctaagtaactagtataaagtgccaagcaaaaataaacatttattaggtatagacaaatgcaaatatattcaatgctttcgtacaaatgtgaatatctgggggccttattatcatcttgttaatatatgccagtgaacaatttgtagacacaagacttgttttacaagcagggtaatatgttccatgaacgtaagccaggaatttaagacttagtgtctatatcttcattctaagaaatgtttcaattaactcactgtgtgtgtgtgtgtgtgtgtgtgtgtgtgtgtgtgtgtgtgtgtgtgtgtgtgtgtatgttttctatctcatgtggtggtgatgagcctagtacttatattcttgaaatggaaatcccattctgatatttcttcctccctcttctctgtcacattaaactgatcaccaggctcttacatattacatacaccagctgaagctcttacatattaccgaatgtctctgtcccgttgttcctactacttcagatcctcattccagtgtctgggacactgtcagagtctaaatagattctaggtctcttgtctcgtctatcttccatctcccaatcctccttcccctgatccattagaatgacagacctaagcatatcctttctgaacataaaaacccttcaataactttagggataaactttaggctccttaacatgatgcatgaggtgcctgaacatctgacccttgacagtccctctcagcattctggcacattcagggtcctaacaataccacccttctccctgccaccatcccaaatccctccccctgctcaccactctccttgttattttccacttcaaagcttttgctccttcaatctgtaaaattaacagccactcatgtgttccttcctttctcctctcttcacagccagcacctggaggtttcttactcttaggaaaaactgcgaccttttctaagatacctcctccctctttccttagtcctgttaaaggttaggtggacattcactgtacctcgaaaatccttgcacatattattttttaacaatcaccgattgatgtacgtctatccaccatacagacctggtacatataagaggacatgccagaaatgaggacgagatcaatgggcaggtagatgaaatgtttagcttccctatttacctgaaacctcatttttgggagtcctaaaacccataaagaatatttagtgctttcaaaaatatcttttacttggccaggtgcagtggcttacacctgtaaacccagcattttgggagactaaggccactggatcacttgaggtcaggagttcgagcccagcctggccaacatagcaaaaccccatctctactaaaaatacaaaagttagccgggcatggtggtcccgcctataatcccagctactcaggaggctgaggcatgacaagaatcacttaaacctgggaggcagagagggtgcactgggccaagatcacaccactgcactccaacccgagtgagggagtgagaatctgccttaaaaaaataaaaaattagctgggtgtggtagtggatgcctgtaatcccagctacttgggggctgaggcaggagaatcgcttgaacctgggaggcggaggttgcagtaagccaagatctcagcaccgcactccagcctgggtgacagaacgagactccatctcaaaaaaaaaaaaaaagtcctggccaggcgcggtggctcacgcctgtaatccaaacactttgggaggccaatgtgggtggatcacgaggtcaggagatcaagaccatcctggcctgtagtcccagctacttgggaggttgaggcaggagaatcgcttgaacctggggaggtggagattgcagtgagccgagattgagccactgcactccagcatgggccacagagcgagactccgtctcaaaaaaaaaaaaaaaatcttttacacagacgctaaatatactgataaaaacttaattgctatccactactattacttttggaaaaaaataagggggagacaggttagcaatttctaagccttccattaggtttaatcttacaattagatgacatcatgttttttgatgtttttgtttgtttctctggcctatgatcatccttcctatgcttataaacaatctttacttcagggctatccaataaagaaggactattaaaaaagcatatatatatatacacacacacacacacacacacacacatatacatatgatatagtcatcatctgctaactactctctatgcaaactgtagctttctaaaatgaatgcttccttgactctgaagaatacaagcttctaccccaaaaaagttcacaaatccctttgctgccacaatcttcacatttctgaaaacttattaaaaggtaattttaacaaaacatgtcagtgaaatgatgagttaacgcatgttacagaagaaaatattagcagtcaaaaatataaaaataggatacaatgatttaaattttacaaaaactggccactggccagggatgctggctcacgactgcactttgagaggctgagataggaggattccttgagaccaagagttagagaccaccctgggcaacatagggagatcctgtttctataaaacataaatagaccaggtgcactggctcacacctgtaatcccagaactttgggaggcagccaaggtgggcagatcacttgaggccaggagttcaagcccagcctgatcaacgtggcgaaaacctgtctctactaaaaatacaaaaaactattcgggagtggtgatgcatgcctgtaatcccagctacttgggcttgggaggccgaggcatgagaattgcttaaacccaggaggtagaagttgcagtgagccaagagtgaaccactgcactacagcttgggtgacagagcaagactctgtctcaaaaaaaaaaaaaaaaaaaaaaaaacaaacaaagaaataaataaaaggaagttaagctatgagaacacaaagggatcagaatgatacacaatgaactttggggacttgggggaaaggatgggaatgcggtgagagatagaagactacacactgggcacagtgtacgctgcttgggtgatgggtacaccgaaatctcagcaatcaccactaaagaacttagtcatgtaaccaaacaccacctgttccccaaaagcctactgaaataaagaaataaatatttttaaaactggccattatatatttaacgacatgtagaaaatttaacaggtcaatacagtgaattctctgctatttagatatacaataaagatattctagtaaattttttcccagtactcacaaaatttcatttttttctaaattccacaatgttctagccacataggagtatttcttattctctgaacatgcctacctgccacctcttccctttgcacctgctatcctaggttacgtcactttctctgtctggaatttttagttgatcattttctgcaaaggtcaaatgcctaattattctgcaaagccctagaagctctttgtatgccttactcaattcctgagacaagaataatttctcattatttacccataatactccattcagccttattattatgtaatatatattttaattttcatacatttattgacttgtcttcctacttgaggaggaaaccccctattttatttatccttgaattcctggtatctaacagaatgcttgatacaaagtaggtccatagtaaatgcccagtaaataaatgttcccaaacttatcctttattacctaccatccattaaggactgatgtcttcaagcccattttccaatcattcctgtcatttcagaattgcatgccccattattaggcataaagaatttatatgaacaaaaccttattaactttttttatttttttgaaacagggtctcactctgttacctaggctggagtacagtcacacaatcatagctcactgcagccttgacctcccaggctcaagagatcctcccacctcagcctctcgagtagttgggagggactacaggcgagcaccaccatgcccggctaattgtttttcttttttgcagaggtggggtctcagaatgttgcccaggctggtctggtactcctgggctcaagcaatcctctcacttcaacctcccaaagtactgaaattataggtgtgagccaccacacccggtccattaacttactttcttttttgttttgtgtttctttgcttgctgttcttttttgagacagggtcttgctctgttgcccaggtgggggtgcagggcacagtcacggttcactgcagcctcaacctctgggctcaagggaccctcccaccgcagcctcttgagtagttgggactacagacacgtgtgcctccccacacctggctaaatttattcttttttgtagagacagggtctcgcttgttgtccaggctggactcaaacttctgggctcaagcgatactcctgcctgggcgtcccaaagtgctaggactataggcatgagccactgagcctattctaacactaagtagaacaaaacaaatcatcaacaacaaaaatccaacaaacataaagcaatcgcatataagaaaagctataaaaaggaaagaaatagaaagaagaaaaaaataaacttgataaacagatacaccatgcttctggaaggaaggattcaatactgtaaaaatatattcatccctaaaacagtacttcactgtaactctaatgtagtctaaattgtgctcttattagtcctaatgttcatctagaaaaatagatgacaatatttgtcttaccatatactaaaatgtatataaagctataataatttaaaatagtgtggcaccaggataaaaacagacacaccaatggaacacataaaaagtccagaaacatactcaagtattcaagaatttagtaatgattcaaacaatatttcaaatcacaatggaaaacagattattcagcaatagtgttgaaaaagttgactaaccaggtgggaggggaaagttgggcacgtatcttaccatattctaaaattaattctaggctaataaaatatttatatctaaataattccttctttggtctaccctcgctccttttctgcttcaacactttagtcttaaagccatgagatggggctaggcatggtggctcacgcccgtaatcctagcataggcgtggtggctcatgcctgtaatcctagcataggcgtggtggctcatgcctgtaatcctagcattttgggaggccagagcaggcagttcacttgagctcaggagttcaagaccagcctgggcaacatgatgaaatctcaactctacagataatacggaaaacttagctgggtgggatgggtgcgccttgtagtcccatctacttagagggctaaagtggaaggactgcttgagccagaggtcgaagctgtagtgagccaaaactgcaccactgcactccagcctgggtgacaaaatgagacccaaaagccatgaggtgagttcaagcatagtaattatccatgagggggtcatggatattggagggggcagtccaatactagtataagagcctgagtaaggctggcttccctaaggggttggggataggggtgaggacaatctcagagcaaggtgaaaagatcaacaaaagtggaagcagtgaactgaggctgaatatcaaatcccaagaggggtgaaaaggactggcatgcaggaaagtagcagcaaccctgaactgggttagaacagcatctgccttaggtggagcagcaacagaaggtatgtcaaaacaggagaaattgatcaaataagtaaactattaaaaatagtgagagtcaggtttctgtctgagcatcataaatacgtgggaaaaaattaaaatgaaaccctgttttgttgggttggatttggcaaagttaatatgagcatatggagttcaatatatagagatggatacagtaatagagatgtgagtgtgtatgtatattcacataatgaatcaaaagtattgtgacctcacagtttgttctctttttttttgagacagcgtctcattctgtcacccaggctggagtgcagtggcacaatctcggttcactgcaacctccgactcccaggttcaagcaattctcctgtctcagcttcctgagtagctgggattacaggcgtccaccaccatgcctagctaatttttttttttttttgagatggagtcttgctctgtcgcccaggctgaggtgcagtggcacaatcttggctcacagcaacctccgcctcccgggttcaagcaattctcctgcctcagcctcctgaatagctgggattacaggtgcctgctaccacacctgactaatttttgtattttttagtaaagacggggtttcgccatcttggccaggctggtcttgaactcctgacctcatgatccacctgcctcagcctcccaacgttctgggactagaggcgtgagccactgggcccagcccattttttttctttttgagacagaatctcactccgtcattcaggctggagtgaagtggtgtgatattggctcactgcactctctctgcctccagggctcaagtgattctcgtcatgcctcagcctcccaagcagctgggattataggcgtgccccaccatgccaggctaatttttgtatttttagtagagacggggtttcattagccaggctggtttcgaactccggacctcaagtcatcccactggcctcggcctcccaaagtgctaggattacaggtgtgagccatcgcgcctggcccacagttttctacatagatataaaaacaatatacgatgtgaatttatagaaatatgtatctctgtaggaatacacacacacacacacacacacacacacacacacacacacacacacaaatttcctagccatgctgactgagagtagcaataacccacacctagcacccgctttggcttctaaatattattctcacctaaacggaatcaaggctcttcagagaaatggtgatttcagaactacagcaggaataatacaagatgagcctagattatactgttgtgtcagaagtagagaaatgcttctctgaaatgataggtcaaaatacacagaagccggcttaaagaggtcccaccaggcaaacctgagacagtatgtacatcaaaataaatgatattagtggaatatgacccattaaaataaaatagcgtaagtccatactaatacaaataatcagggagtaaagaaagcttcaccttacagtggaacatcaactgatgaatgtgaaagaaaaggtgaaattagaaaatcactacttgccatcaatcctagtcataaattaggtcaagaaacatcaatgaatactaaaattagtgaggaaaaggtgcaaggaacaagatgtttatatgagaagtacttcccccacaaaatccatactgactataaagagaaaaaagattaacctcacagtggagaaacctgatagacacaccttaaccaagtggtcaaggaaaaactgaaatcatgtaccacctgataggatgcaaacaaaaaacacagaatcacatatgtgatactcctgctaaaaacataactgcatttaatcatgatgaaacatcaggcaaatacaaataggaggtcattctacaaaataactgacctgtaatattcagaagtatcaaagttatgaaactcagggaaagactgagttactatttgagatttaaaaagaccaaagaggactgggcgtggtggctcagacctgtaatgccaacagtttgggaggctgaggcaggcagatcacttgaggccaggagttcgagaccagctgggccaacatggcaagagcctgtctttactaaaagcagaaaaaaatcagctggacgtggtggtgcacacctgtaatcccagttactcgggaggctgaggcacgagaatcactagaacccaggaggtggaggctgcagtgagccaagattgcgccaatgcactccagcctgggtgacagagagagactctgtacaaaaataaaaagaaaaagaaataaaaagaccaaagagtcaaaatgcagtttgtgatccttttgctataaagaatatgtctacaaaaacacgaatgggttccaaagatcagacaggaataatgcatcgctgttaatttccttattttgatggtatattgtatatgcccaggagaatatccttctttatgggaaattctgaagtattcaggggtgacagcatattatattggtaagttactctcaaatggtttagggaaggaagagttcttttgtactattcctgcaacctgtttgtaagttttaatgcttttaaaattaaaaagaaaaacaaggtttttaaaaatgaacttccaaagcactaaaaaaaagtgcattaatatgaagattttctttgcacagcaaaggcagaaacaataaagagcatttgcgtaaattacctcaaaaatgtaaacttctgcattagaaaaagttaacctgctagaatcccaataacaaaaactatgaagacataataaaattaaacaccaaacgttaaactatgggaaaaaacacacacagcaaatatacaagacaaaagaatatgatctctaatataaaacactttgtaaaaaaattataatattaaaataaacagatatggaaggtcaattaacatacatgaataatcttcaaaaaaaaactttaaaataaccaaccttaccagtactcaaagaaactcattcaaacattttaatattttttttactagaaagaatagcaaagtttttttaagagtaacacagtgtacctaacataatagagggttatgagcaatctcacatacagctaatacagtgtaagttctagaggacaatttcacacagtgtatttcttgaagcttccaaaatgttcacacacttttacagagatgctagcagtgtatactaaatgccagacaccaaactaggcccttcaaccacaaagggttgcttaattaaatttacagtttgttgaatctcatgatattctgtattacagactaaatatctattaaaatacagcagaaacacaatttattgacatacaaaagatgctgtgtaattttcaaaagtaaacaaaaaatataagcaaaacaattcaactttttcataagtatatattataagcaaaaatacacagaaaaaaccccgtctctactaaaaaatagaaaaattagtcgggcgtgatagtgggcacctgtaatcccagctactcaggaggctaaggcaggagaattgcttgaacccgggaggcagaggttgctgtgagccgagatcgtgccactgcattccagcctgggtgacagagtgagactctgtctcaaaaaaaaataaataaataaaaagtaaaataaaataaaataaaataaaataaatattaattacagaataaaaagtttttttgcacaaaaacatttaaaatcttaaagctggctgcaatttcttccacggttggaatgtgaaccttcaattaagtggtaaaactgtatttaaaggcacattgggtaatggtgaaacctaaaatgcagaggagaataaaacaataacatactaaatgaagaaaaatatacaggaaaaaagcaaacattaagttttttttttaaggccaacaataaaaacagtatcttggggtacaaataacttgaggggggggacaagtaacattctaatgtaggactgtttttcaaaaaagaatatgatacattgtaatgaatattatgcaaaataataattaattcaaatttaacagactcttgatacctgaaagagcaaaagaggtcagtaattcataaagggccaatctgtaaggattaaaatatcctgtaaatcgtagaatactacatacctaggttactatgaaaggtaacacagttttgcttgctttgtactcctgtgaccttagtaacatattaataacattttaataactgtagtttggtgtagtaatttttttcccacatctccctgaacttgatggagacctacaatttttttttttttttttgagacagagtctcgctctgttgcccaggctggagtgcagtggtgtgctctcggctcactgcaagctctgcctcctaggttcacgccattctcctgcctcagcctcccgaatagctgggactacaggcgcccgccaccacgcccagctaatttttgtatttttagtagagacggggtttcaccgtattagccaggttggggagaactatcattttaaaaacacaaagacttcctttctatttcccagcagtgatattcaaacagtaataaaataatatccactgtaccttattacaatgatcatgtggaacagactgtaaaacaattggttccattgtggaatcattggcaaattgtacctccggaatatacagagcacacacctcatgggcccaacctaaaaataaataaataaatgtcatcttttcagttttatcaaaagcaaattaacatcattaatttccttaacagatccctacaatgtctattgaaacaaatgcataacaaggacattaacaaattctcattgctgtcttacttccattgcttgaggatactcaaaccactactaaaaaaagcattcttaatcatttccccagttatgatgtacaggaacataaacaaagggaaacatttataaattcagatgttggcactaacacttcttatacaggcagactaaatattcagatcaacactactaatgagaaccactataaaaggagtttttaaaagtttaatacttatgataaaatttaataatcttaatcattttaaatgttaacatgaaattatttttatctcggtgtcaatatttttaatattagtaataacaatcatttcactattttaattggaaaagttttaaatttggtattaaatatatatattttatgagatggagtttccctcttgttgcccaggctggagtgcaatggcgcaatctcggctcaccgcaacctccgcctcctgggttcaagcaattctcctgcctcagtctcctgactgaaggtattaaggagctgatgtgatagtgaggaatttctgggctaaaactggaaaagaatgtaagtcctaggcacagtttttggccacttttgcccagggaacatttgcctatttcagagaaagcggtggtgaggatgaagggtacaattcttttttttttttttttttttttagacagagtctcgctcttgttgcccaggctggagtgcaatggcgcgatcttggctcactgcaaactccaccttctgggttcaagcaattctcctgcctcagcctccccagtagctgggattacaggcatgcaccaccacacccggctaattttgtatttttagtaggggtggggtttctccatgttggtcaggctggtctcgaactcctgacctcaggtgattcgcccacctcagcctcgcaaagtgctgggattacaggcgtgagccaccacgcccggcctgaagggtacttttgacaaactcagaggcccaacagtacagggatgtacattcacaaacaaccaagagaaaaagagtacaagtaaacccctctcctcctttcagatgcaacactgaacggcaaactggggatgagaatacactaaaagtacatagaccctcaaagagacgacaccagggctctgaccatctcaaactctgaaatttgatgaaggtaatccgaaattacaactcccaaggcacgaagcagatgtaaacatacatcctctctaaaagaaaatagtatcattttggctacaaataatttctacctttttttttttttttttttttgagacaaagccttggtctatggcccaggctgaactgcactggcgtgatctcggctcactgcaacttcctccttccagttcaagcaattctcctgcctcagcctcccaagtagctgggattacaggtgcccaccaccacacctggctaatttttgtatttttagtagatatgaggtttcactgtgttgaccaggctggtctcgaactcctgacctcaagtgatccaccagtctcagcctcccaaagtggcgggaatacagacatgagccaccacacccagcctaaaatttcttaattacatataatttccagcacaataataagtaccaaacacatgacagacaagacaatatgaatgagaataaggagaacacgaacatcaaaacagatcagtattttggagttatcagataaagattttaaaataagtatgcttactatgatcaagtacacacaagacaaaattctaaattgatgcaaagaaccgaaaactataataataaattaaaattccagaagtaaagcggaaatttagaaatcagtcaggcacagtggctcatgcctgtaagcccagtactttggaaggctgaggcagatcgcttgagaccaggagttcaagaccaccctaggtaacaaagtgagaccccatctctacaaaaaaaaaagtaatgagccaggtgcagcggcatgcacctatagtcccagctattcaggaggttgaggtgggaggattgcttgagcccaggagttggaggttgttgtgaatgattattgtgccactgcaatccagcctgggtgatagagaccctatctcaagaaaaaaaaaatcagtgggtgggattaacagcagtttagacatggatgaaaagagaattagtaggaacacaacaggtcagaagaagaaatccagaatgttagcacaaaacacaaaagtaagaaatacaaaaaatggaataagacacatgaaaaatgtaataggcaggcaggtctaacacacatgtaatcagagtctcggagaaatatgagagagaaaatggcatgaaagcagtatctgaattgataatgcctaaaaattttccagaacagaagacccaaagccactgactgaagaaccactataaatcagagtaaataaatacacgaaggaacattaataaaactacagaaaactaagggaaagaaatgaaaatcttaaaaacaaaaggcaagttatcaaacgaaaaactagataactaaataaagccagaaaacattatgtaaaagatttccatgaaagggaacaccaaacaattttccttgggcaataggaaaatgattccagaaggaagctcagaactgaagaaaaatataaagaacgataaacatgtaggtacatttaatatataatgcacatataaaacaataatgccttcacactcatttacaatacaaatgaccacttacactaaatattaaaacactggtacggtctgtggatgtatgtagctttcctataaaactacagcaaagactggaaaaggaacaggtaaaagaagtctatatggtttcattctacatttcgtgttaagtggtacacacaggccaggtgcggtggctcacgcctgtaatcccaatactttggatacccaaggcgggcagatcacttgaggtcatgagtttcagaccagcctggccaatatagcgaaaccatgtctctactaaaaatacaaaaattagctgagtgtagtggtgtgtgcctgtagtcccagccactcaggaggctgaggcaggaggactgcttgaacccaggaggtggaggttgcagtgagccaagatagtgccactgcagtccagcctgggcgacacagcaagacaccgtctcaaaaagaaaaaaaaaagtggtacactcagtagactgaatttactgataagaaaattataatccctacagcaaccactatatagataaatataaatacttatataaataggaagagatatggccaaaaaggcaatttaaggcaatttaatataattaattaagtttaaatgcaatactatctagttgcattgttaaactgattaaaatacagcactaaaaaataatcacaaaaagaacagaagagaaataagaaataagtgggaaaaatcaatgttaagagcaaacagcagaagacttctacttctgtccaaggtagactaaggcagtcaagagaaagtcacaagggaaactggaaaatgtcttgaacggaatggcaacaaacatgtaatttatcacaatttgagacgcaggctggggacagtggctcacgcctgttaattgcttgacctcaggagtttgagaccagcctgggcaacatggtgaaaccctgtctctacaacaaatacaaaaacattagccagataaagtggcgtgcacccgtagtcccagctgcttgaggggctgaggtaggaggatcgcttggacccaggaggtcgaggcttcagtgagccgagatcacacccctgccctccagcctgggtgacaaattgagaccctgtctcaaaacaacaacaacaatggcaaaaacaaaaacaaaaaaacacaacttgtgggattcaataaaagcaatagagaggaacttgcagcatatatattttcattagaaaagaatatctaaaacaaaagacctaaggttccacctttataagttagaaaagaagaggaaaatataacacatagtaagtagtaggaaggaaataataaagagcagaagtttaacacaatagaaaacagggagatggcataaaaaattaacgaagcccaaaacttctttaaaaaggtcaacacaactgaatgattctatttggactggtcaaaaaaataaaaataaaaacaaagaaaaaccagaatacaaatcaccaacatctggccgggtgtggtggctcacgcctgtaatcccagcactttgggaggccgaggtgggtggatcacctgaggtcaagagttcacgaccagccgggccaacatggtgaaaccccatctctactaaaaatacagaaaattggctgggcgcggtggctcacgcctgtaatcccagcactttgggaggccgaggcgggtggatcacgaggtcaggagatcgagaccatcttggctaacacggtgaaacccggtctcaactaaaaatacaaaaacttagccgggcgcggtggcgggcgcctgtagtcccagctactcgggaggctgaggcaggagaatggcgtgaacctgggaggcggagcttgcagtgagccgagattgtgccactgcaatccggcctgggctaaagagcgggactccgtctcacaaaaaaaaatacagaaaattagctaggcgtgatggcgggcgcctgtaatcccagttactcaggaggctgaggcaggagaattgcttgaaccagggaggcggaggttgcagtgagccgagatcccaccactgcactgtacccagtggtgtacccactgcacagttacccagcctgggtaacaagagcaaggctcagtatcaaaaaaaaaaaacaaaaaaattaccaacatcaggaataacaatggggtaataaccaccaatgctagcaaaattaacaaaataatactaaaatactattgacagccgggtgcggtggcttgtgcctgtaatcccagcactctgggaggccaaggcgggtggatcacctgaggtcaggagttcaaggccagactggccaacatggcaagattctctctctactaaaaataaaaaatattagctgggtgtggtggtgcccgcctgtaatcccagctactcgggaggctgaagcagagaatcacttgaacctgggaggtggagtccgcagtgagctgagctcatgccactgcactccagcttgggtgacagagcaagactccatctcaataaataaataaataaatactattggcaatgttagtccaacaatttcagcaacttatacaaagtagtcaaatttcttgaaaaaatagagcgcaccaaaattgacaagtttatacaaataggccgggcccaagggctcatgcctgtaatcccaacattttgggaggatgaggcaggggcatagtttgagcccagatgttcgagaccagcctcggcaacaaagcgaaaccgcttgtctctacaaaaaatacaaaaagaaaaaaatattagccaggcatggtgtgcctgtggtcccatctattcaggaggctgggggaggaggatcatttgaactcaggagtttgaagctgcagtgagctatgactacatcactgcactctagcctgggcaacaaagtgatacactgttaaaaaaaaaaaaaaaaggaagaaagagagagagagagggagggagacagggagggaggacagaaaagagaagaaaagaaaaagagaaaggagggaaaaaggaatgtccctataattttgccaaaaaacgaatttatcaaaaattttcccagaagagtttcagttgctcacgaagttctatatagaattcaaagaaaaataacacgaaatttacacaaactgtttcattttaagtgactagcataatcctcaacaaacacctgacaaaaccactataattcttttttttttttttttgagacggagtctcgctctgtcgcccaggctggtgcagtagctggatctcggctcactgcaagctccgcctcccggattcacgccattctcctgcctcagcctcccaaatagctgggactacaggcgcctgccaccacacctggctaattttttgtattttttagtagagacggggtttcaccgtgttagccaggatggtctcgatctcctgaccttgtgatctgcccgcctcagcctcccaaagtgctgggattacaggcgtgagccaccgcgcccggcccaaaaccattataattcttaaggaaacagagaatgaaagtacatgacaaaaataaaacatacgtcaggagatggacaagtgaatttacagtatcctaagagtttcagaggattcagaaagaggaaagaagcacatagtaacattaactttttaaaaagctaatagagagggtagaatggaacgagtggaacaaaccagaataggaaagacaaatacaaaacatttaataagatgggaggcttacaccaggtgcagtggctcattcctgtaatcccaacactctcaaagctgaggcaggaagatcacttgagcccgggactacaaagctgcagtgagctaggatcctgctacttgcactccagcctgaacaacagaatgaaaacctgtcacttaaaaaaaaaaacaaaactttggaatagtgaaggcctttctaactaataactcaaaatactgacatcatgaaagactaataaattgtacaaaattaaaatcaaaaacccatgcatggtaaacaaattttttaaaaagcacaatataaataaagactaaccagatgggcaaaaattagtccaactcatatcaaaacagcataataacatataaggggctccttatggatgctccaataaatcaaactaaaaagatcaacaactgtggctgggcatggtggctcacgcctgtagtcccaccactttgggaggctgaggtgagtggatcccatctctactaaaaattaaaaagtcagctgggcctggtggcgtgtgcctataatcccagctattcaggtgagtgaggcaggagagtcctttgaacgggggaggcagaagctgcagtgagccaagatcaagccactgtactccagcctacatgacagacagagaccatctcaaaaaaaaaaaaaaaaaaaaaaagatcaacaaccaagtcaaaaagcagaccacagaagagaaaaaaacaaattgctcttcaaactgttaaaagatgtcaacttcactaatattaagagaaatgcaaaacgactgcttggatatacaaactttcacctgttaggtaagcaaaggtataaggaacagcttttttattcatatattggtaaaactgggaacatatattggtaaaactacagggagaataacttgggactatccatcaaaattaattgcaaaactcctttgacccaatgtttccacctacggaaattaataatcctatagatatacttgtataccagcaaaatgacatatataaaagagttagtcatcaaagtagatcagaaagtgcatcaacaactgattgattagataacatggttaaaaaggaaaaaaaaggctctatactgataacaggataaattgttcatgccgggtgcggtggctcacgcctgtaatctcagcacattggaaggccgaggcagtaggatcatttggggtcaagagttcaacaccagcctgaccaatattgtgaaaccccatctctactaaaaatataaaaattagctgggcgtggtggcgcatacctgtaatcccagcaacttgggaggctgcagcaggagaatggcttgagccgggaaggtggaggttacagtgagcggagactgcaccactgcactccagcctgggtgaatgagcgaagcttcaaaaaaaaagaaaattgaagaaaaaagaaaagaaaagtctcaaaaaaaagaaaaaagataaattgttcagtgaaataaattaagacgcagaagagtatataatattaacccatttgtataaagatggagggagtaaagaagtatttgtccattcacatctgaatatgcaaaagaaacctagaaagatatgcaagaaagtaaataattataaggtagcaggaaagctattgataaactgggcagatggggaagaggagtaacaggaagggttttcaatatatttttaaattttgtacaatctgactgtataacatagtctgaagattaaactgtataatatatatagctagccaaaatgattgtatttttcccatttattcacaccattactctagtctatgccaaaactactttagaggtggctacccaaaatggagaagagtatagtatctactttttttagctgccgcatcatgtatgccatggcttaataaactcacgtctacacatttcagaacagtactgagctacatgtacaaaaatacgagttctctaacaaagataactaaaagtagagaagaaaatgagtaatgcacaagggtccataggaaagcataccaaaatgtgatacagaagtcagcatttctttttttcttttcttttttttttttttgagacagggtctcactctcacccatctcagggactgaagtacagtggtgtgaccatggctcaatgcagcctccacctcccacgctcaagccatcctcctgctcagcttcccaagtagctggaactacaggcacgtgccaccatgtggaactaagtctttttatttttattttttatatttacttttgcagagaccaaggtctccctatgttgcccaggctggtctcaggctcctacgctccagtgagcctcctaccttggcctctcaaagagctgggattacaggtgtcaggcacccagcctaaaagtcaacatttctttatattccagccacaaagatcctcagagttaaatgaaattaacattcactagaaacatcatctgtctagagatatacaaaacagaaaaaaagaatctaaaacaacagattttaggtctaacaacaacaacaacaaaatgtggctcatttttcaaaaaaaattcctaacacaagaaactatatccatttaacaaaatacactttcttttttttgagacagtctccttctgtcatggaggctaatggtcaatggtgcaatctcagctcactggaacctctgccccccaagttcaagtttttctcctgcctcggcctcccaagtagctgggactacaggcatgcatcaccacgcccagctaatttttctatttttagtagaaaccaggtttcactatgttggccaggctgctctcgaactcctgacctcaggtgatccaccaccctcggcctcccaaagtgctgggattacaggtgtgagctacctcgcccagccaaaaaaataagaattttaattagaagtatgtatttaataaatcattctgcataaagtagccaatgcttaagtttgtccacaaagtagaaaaattgtgggtcaatacataataatgattcataaattatagccactactgttaaaaatgagtagaaaacactgtttaatttgatgaaataaaataaactaccagatatttgaaaatactccaccgccccagttttcaataaaaattttttcaagaaatctctgcacttacccccattatctgttctttttaaagctccatccttatggggacaaagttcacatctctataaacaagaaaagaaacacgtaatgaagaaatatttcagattatcaaaaatgtaatatcttccctgcaacttcaaaactactgaaaatgtgagagcagcatttgtactagttgccccccaagaatatttaggaacattcttcacaaacagttgttcttgacgacatgtgatcttcttcagcgaacaagtaatttttttaaagtacattttaacttttaaactcctgccacgggccaggcacggtggctcatgcctgtaatcccaggactttgggaggccgaggcgggcagattacctgaggtcgggagttcgagaccagcctgactaacatggagaaaccccgtctctactaaaaataaaaaattagccaggcgtggcggcgcatgcctgtaatcccagctactggggaggctgaggcaggagaattgattgaacccgggaggcagaggttgcggtgagccaagatcgcgccgttgcactccagtctggacaacaagagtgaaactccatctaaaagaaacaaaacaaaacaaatcctgccacaagtttttaaatcttacattaataaaaacacaaagatgctgggattatttacctggggagcgggagaaaaaaacaaaaaagtcctctcaacacaggaatggggcaaggtttttaacatctgcctgttacctgtttacttcctgttttatggtcagctaggatgaccgcagtcaagtgggtctggtttctcttaaagagccaaactcaagaatttagaatttgaatttaagtggcaagaaatgatctcatgcatgctgatttcccttctgaaaggaattaggctaatcagctattattattcaaacacagtggtactcaaaatttattgtggattcctctccctcccatcctcagaatttaaaagcagaaataaatgtagagccagtactactacttcttatgaaacacagtaagtttcaatggcattgtcttactatgaagaatatgttcctgaaagtcgcacttgagtattatttatatcccactttgtttccaaaagaagttttccagcatacagtatcgtaatataggccgggcacagtggatcacacctgtaatcccagcactttgggaggctgaggtaggcagatcgcttgagcccaggggttccagggcagcccgggcaacatggcaaaattccacctctacaaaaaaaaaaaaaaaaaaaaaaatagttgggtgtggtggtggtgcacctgtagtcccagctactcggcaggctgaggcgggctgatcaattgagcccagaaggtcaaggctgcagtgagccatgattgcaccactgcattccagcctgggtgacagagtggaccctacctcgaaaaaacaaaaacaaacaaacaaaaaaatgtgtgtgtatacatatatgtgtgtgtgtgtgttgattatatatgtatatatacacacacacattttatatatacacacactatatatacacacaccatatatacacaccctacatataaatatatatacacttacatacatatataaattacaacaaaaattagagtagaaaattaagttgaaatagttttaaaagtacagaaggcataagccataaaagcctactgaggctgggtgcagtgcctcacacatataatcgcagcactttgggaggccaaaatggaaggaccacttgaggtgaggagttcgagaccagcctaagcaacaaagtgagacctcatctctacaaaaataatttaaaaaaaaaatagagcctatttgccaggtgcggtggctcacgcctgtaatcccagcactttgggaagccgaggtgggcggatcacgaggtcaagagatcgagaccaccctggccaacatggtgaaaccccatctctattaaaaatacaaaaaattagctgggcatggtggcacgtgcctgtagtcccagctacttgggaggctgaggcaggagaatcacttgaaaccggaaggcagaggttgcagtgagtcgagatcacgccactgcactccagcctgggcaacaagagcgaaactgtgtctcaaaaaaaaaaaaaaaaaattacagaggctattgataaagtttggatatttgtgcctccaaatctcatgtaaaaatataatcccgatgttgaaggtggagcccagcaaaaggtgtttgggtaatgggggcagaaccctcatgaatgtcttggtgttttccttgtggtaatgagtgagtttcttgctgttgttagttcacgtgagatctgattggtaaaaagagcctgccatctagctccctcccctcaccatgtgacactcctggtccctatgcccactcccccataagtaaaagcttcctcagcccaaagatggtggtagtatgcttgtactgcctacagaactgtgaaccaaataaacctcttttctttatattaataatctacccagtttcaggtattcctttatagcaacacaaaacagactaatactgctgtatttcttgcctttcagtatttcactctcctgattttccctctttggtggcacctttctgatcaccctatcaaacctttaaatggtgaagttcctcagggttctggcctaagatgtcatctctctttttttttttttttgagacagagtcttattctgtcgcccaggtttgagtgcagtggcgtgatctcggctcactgcaagctccacctcctgggttcaggacattctcctgcctcagcctctgagtagctgggcctacaggcacccaccaccatgcccagctaatttgttgtgtttttagtagagacggggtttcactgtgttagccaggatggtctcgatttcctgaccttgtgatccgcccgcctcgggctcccaaagtgctgggattacaggcatgagtcaccgcgcccgaccaagatgtcatcttatttcacgtgaaacactaggtaatcttattcactgtccaaatttccattaccaactaaattataaaaatataacagtgactcccaaattttatctatttgtgtctgtcctcagggtcaggtataaactctatatgctacataaacactttattttattttattttgagatggagtctgttgcccaggctggagtgcagtggcttgatctcagctcactgcaacctccaacaccagggttcaagcaattctcctgcctcagcctcccaaggagctgggattacaggtgtgtgccaccacttccatctaactttttctattttcagtagagatggggttacgtcatgttgcccaggttggtctcaaactcctggcctcaagtgatctacccacctcagcctcctaaagtgctaggattacaggcgtgagccaccgcaccacccagcctacatagacacttgaaacgctccacaatttatgacaaaacctgctcttcctgctctttccatatattggtaatgatattttcaatgacacattgctcatgcgagacaccaagtatatataatctttgaccacttcataccttactccctaacctcacttttaatccataactgtattgtgcccttcctcttctgaaatactagtgagagctgcctatctctctccatctccactatcaccctacttaaagccagcatcgcctttcatcgggaccacttcagtcacctcttaaatgcagtagaccccagttatccatgggagaaacattctaagaaccccagtggacgtctgaaatgacaaatggtactgagcacttgattctgttttttgctatacatacatacctataaaaaagttgaatttataaattaggcacagtaacagattaacaataataataaaatacaacaggccagatgtagtggctcaagcctataatcccaggactttaggaggctgagttgggcagatcacctgaggtcaggagtttgagactagcctggccaacatggtgaaaccccatctctactaaaaatacaaaaaaattagcgaatgtggtggcgcacacccgcagtcccagctaagcaggaggctaaggcacaaaaagcaactcaacccgggaggttgcagtgagccaagatcgtgccactgccctccagcctgggtgacagagagaggctccaactcaaaaacaatttcaaaaatttaaaaaaaattataacaatctactataaaaaagttatgtgaatgtggtctctctcaaaatacagtctgcataaaaacaaccacatatacgatggtggccccatgagattaaatggaactgaaaaattcctattgcctagtgacataatgatgtaatagccatagtaacatgacagagcaaattttaaaataaatttagtgtacattaagtgcacaatgtttataaagtctatggtagttgtagcagtccattctctcactgctataaaactacctgagactgggcaatttataaagaaaagaggtttaattgactcatgttccacatggctgagaaggcctcaagaaactgtcagtcacagtgagaagggaagcaagtacgtcttacatggcagcaagcaagagaaagagaatgtgtacataggaaaaaaaccaccactttcaaaaccatcagatctccagagaattcactcactatcacaagaacaggatgggggaaactgcccccattatccagtcacctccctccttcaacacatagggattataattcgagatgagatttgggtggggatacacagccaaacgctatcagtaatgtacaataatgtcccaggctttcacattcactcaccacttactaactgactcacccagaacaacttctagtcctgcaagcttcattcatggtaaagccctatacaagtgcaatttttttttatctttcatatcattattttaggtgtaccttttctatgtttaaaaatacaaatacttaccattatgttaagttgcttacaggattcagtaatgaaatgtacaagtttgcagcctaggagcaataggctataccatgtagcctaggtatgtagtaggctatacaatatagctttgtttaagaacattctaagatgattgtgcaatgacgaaatcacctaatgaggtatttctaagaacatacctccctcctgcattacacaacacatgattctacctcactgtactcacctattttcagaggggttgaccatgggtaactaaaaccaagggaagaaaaaccgcagataatggaaaatggctgtagtctccaaatattcactctcaaccaactatcaccaatctgcagaatgaacttttcacaacacaacgaacttcagaaatgcaatccaaatataccactgcccacttgaaaacacttcaataggccgggtgcagtggctcaagcctgtagtcccagcactttgggaggctgaggggggacggatcatgaggtcaagagatcaagaccatcctggccaacatggtgaaaccacatctctactaaaaatgcaaaaatcatctgggtgtggtggtgcgcacccatagtcccagctactcgggagactgaggcaggagaatcgcttgaacccagggggtggaagttgcagcgagtcgagatcgcaccactgcactccagcgtggcaacagagcgagactccgtctcaaaaacaaaaaaacaaaacaaaacaaaacaaaaacacttcaatagtttccctatatcatatagccttttcttatctccaccaccttctctccttccaacatttcacttcatgggcaacactggctttttcttctttcaattctataaatttgccagagctcattctcacttcaaaggcttttaacgggttagtttgactctaaatggaatattgtcattcactgtaccctctttttcagctgggtaatttctatgtatccggcaggtccttgcttaaagccacttcatcaaagacaatgtctctgaatctccagatgaggttaggtgccatatgatgatttacctatgctttccttcttgggatatattacaattgcaattagctatttatgtaattaagttaactcctctgctagattagaagctccatttcatggctgtagctacccctaacatcaggcacattatctaggcacaataactcaaaaactacatgatgaaggaataaaaggaacaaaatcacaaacatcccattgctgttataaccaaaaaaaaaagaaagaaagaaagaaattttaaaaaggtcttaattttggccgggcgcggtggctcacgcctgtaatcccagcactttgggaggccgaggcgggtggatcatgaagtcaggagatcgagaccatcctggctaacaaggtgaaaccccgtctctactaaaaatacaaaaaattagccgggcgcagtggcgggcgcctgtagtcccagctactcgggaggctgaggcaggagaatggcgtgaacccgggaagcggagctttcagtgagccgagattgcgccactgcagtccgcagtccggcctgggcgacagagcgagactccgtctcaaaaaaaaaaaaaaaaaaaaaggtcttaattttaaaaaataggccaggcgtgatggctcatgcctgtaattccagcactctgggaggccaagtcaggcggatgacatgaggtcagaagttcaaaaccagcctggcgaacgtggcgaaaccctgtcactactaaaaatacaaaaattaggcctggcactgtggctcatacctgtaatcccagcactttgggaagccaaggcagatggatcacaaggtcaagagatcgagaccatcctggccaacatggtgaaaccccatctctaaaaaaaaatacaaaaattagctgggtgtggtggcacatggctgtagtcccagctactcgggaggctgaggcagaagaatcacttgaacttgggaggtggaggttgcagtgagctgagatcccaacactgcactctagcctgacgacagagcaagactccgtctcaaaaaaaaaaaatttagccaggagtggtggcaggcacctgtaatcctagctactcaggaggctgagccacgagaatcacttgaatccgggaggcggaggttgcagtgagccgagatcacgccactgcactccagtctgggcgacagagagagactctgtcaaaaaaaaaaaaaactcaaaattcatttttatataatttcgatgacaccataatcctattcttttggacagcagttaagcaataagaatcaagaaaaaaaatctgatttaattgcttcacttttagagagccaaagcaaataatataagatatagcatgtataaattacctttctgtcttttatatcatttatatactttatcttcaagacatgaaaatgtatgcacaaagatattttatataaccatttataaccatacaacttttataaaagtctggccggctgcagtggctctcacttgtaatcccagcactttgggaggccgaggcaggtggatcacttgaggttaggtgttcaagaccagcctaggcaacatggtgaaacccatctctacttaaaaatacaaaaaattagctggacatggtggcgtgagactatagtccagctattagggaggctgaggtcggaggatcacttcagcccagggggtcgaggctacagtgagctgaggtcacaccacagaactccagcctgggtgacagagtaagatctcatctcaaaaaaaaaaaaaaaaaaaaaagatctggccgggagtagtggctcacgcctgtaatcccagcactttgggaggccaaggcaggcagatcacaaggtcaggagatcgagaccatcctgaccaacatggtgaaaccccatctctactaaaaatacaaaaaagtagccggatgtggtggcacaagcctgtagtcccagctactcgggaggctgaggcaggaggatggcgtgaacccgggaggcggaggttgcagtgagccgagatcgcaccactgcactccagcctgggtgacagcgggagactccgtctcaaaaaaaaaataataataaaataaaaattcactgaacattaaaagaaaatacacaaaatacgctgggcacagtggctcacgcttgtaattctagcactttgggaagccaaggcaggcagatcatgaggtcgggaattcgagaccagcctcaccaacatagtgaaaccccatctctactaaaaatacaaaaaaaaataagccaggcttggtgtgcgcctgtaatcccagctactggggaggctgaggcaggataatcgcgtgaagccaggaggcggaggtttcagtgagccaagatggcgccattgcattccagcccaggccacactgcaagactccgtctcaaaaaaaaaaaaaaaaaaaaccacaaaatatattaataggactgtggtaaggatggtaagattatgagtgatttctttcctctattgcaaactataccatttcctttataatgtgaagtgtttttttgttttgttttgttttgagatggagtctcactctgtcacctaggctggagtgcagtggctcaatctcggctcactgcaacatacacttcccgggttcaagcgactctcctgcctcagcctcctgagtagctggggttacaggtgcacaccaccgcgcccgactgatttttgcagttttagtagagatggggtttcactgtgttagtcaggctagtctcgaactcctgacctcgtgatctgcccgcctcagcctcccaaagtgctgggattacaggcgtgagacaccgcgcctggtctataatgtgaaattttatagaaaaatgtcgctaaatgctaatcaagtctgcccaccaaagataaacctataataaaacagggtgtctcagcaacaacaacaacaaaaaaaaaaaaaaaaaaaaaaagaaaccataagccaagcatggtagcaccaatctgcagtcccaaatactcagaagggtgaggcaggagaatcacttgtgcctgggagtttgaggctgcagtaatataatcgcaccactgcactccagcctgggcaaaagagcaagactcggtctcaaattaaaaaaaaaaaaagatagaattttttaaatactaaaaatacaacatgtgaagtgaaaatttcactcggcaagcttcacaacaacaaatctgagatgacagaagagtcagtgaacttgaagctacatcgatagatagaatctaatgtgaggccaggcgcggtggctcacacctgtaatcccagcactttgggaggccgagatgggtggatcacctgaggtcaggagtttgagaccagcctgaccaacatggagaaatcccatctctactaaaaaatacaaaattagccaggtgtggtggcacacacctgtagtcccagctactcagcaggctgaggcaggagaatcgcttgaaccaggaggtagaggttggggtgagctgagatcccaccattgcacttcagcctgggcaagaagagtgaaactctgtctcaaaaaaaaaaaaaaaaaaaaaaagaatctaatctgaaagagaaaatagaggttaaacaaacaaacaaaaaacagggcttcagggacctacagcacagtaccaaaaggtcttacatacataaccaaaggcctaaaaaagaagacagaaagaatatgaggcaggaaaggaacttttgaagaaatgatggctgaaattttcttcaatttgaaaaaagacaaatccacagattcaggaatctcagcaaacctcgaatagtcaaatgccttgctaaaaagcaaacacagagggaaaactcttgaagcaccaaaagaaaatgtcacattacacagagggaaccatgactggataaacggcagatttctcatcataaaatatggaagccaaaagaaaataaactaaaataccccttgctaaaagataaggcactgtcaacacagaattctatatccaaccacaatgcccttcaaaaatagaggtgaaatagatactttcaggtaaaagaaagcaagcacaatttatcaccaaaagatacgccctgcaagaaaggctaaagaaattcttcaggattaagagaaatgatgctagaaaatgcaaatcttcagaagacaaagaagactaccacaaatggtaaatatctaggtaaacttagatgacttttagctcttaagttcttaacattacatgattattgaaagccaaaattacattgttgttttctggggcttataatgtacatagttccaacacacatgacaatagcataactgacaacaaacagaggtgatataaaagaacaacttacaagctttgtatactttacaacttgtacaatattagtcagaagtggtaatactataaaaacagactgaaaagagtaaagaaatatatttaaattgctagagaaatgtgccaaagaattaagttgaaacccttcctgatattaaaaaattaattcaaaagtgaatcgcagacctaaatgtaagagctaaaacaataaaactttagaaaaaaacataggaggtaagtctttaggacttggttgaacaacagtttttagacataacactagataaaagtagaggcaacaaaagaaaaaataactagaatttaccaaacctacagacttttttgctacaaacaaaatcatcaggaaagtaaaaggatggaagaaatatttacaagtcatatgtctgataagtagtttgtatccagaatacagagctcttccactcagaaataaaaagctatacagcccagttaaaaattgaacaaaggggccgggcacggtggctcacacctgtaatcccagcactttgggaggcctaggcagggggatcacctgaggtcaggagtttgagactagcctggccatcatggtgaaactccgtctctgctaaaaatacaaaaattggccaggcgtggtggcgggcacctgtaatcccaggtactcaggaggctgaggcaggagaagcgcttgaacccgggaggcagaggttgcagtgagccaagatatcacaccactgcactccagcctgaacaacagagtgagactctgtctacaaaagaatataatgaaaaaagataagtaaaaatcaacaccacaatgagatactacctcatgccctgtaggatagctaaaatcaaaagccaaacaataaaaaatgttggcaaagagatggagaaattaaaaccttcatatattgttgctggtaatttaaaatgttacagcctctttgtcagtttttcaaaaggttaaacagagttgcagcatgaaacaaaaatcctaggcccaagagaattgaaaacaaatgtctggatttgcagacaaatgttcataataataacattattcataatattgcaaaagtatatacaacctaaatgtttatcaattaatgaatgagtaaagaaaatgtagtatagccatgcaatagaatattatttgacaacaaaaaggaatgaagttctaataaatgctacaaaacaaatgcttgtacatgatgctaggagaaagaagccactcacaatacaccaaatgattccatttatatgaaatgtgacaaatagggatggagacagaatgaagattagtgattgccaggagctgggcaagtagggtaatggagagtgactgttaatgggccaaagggcttctttttgaggggatccaagtgttctaaaattgattgtagtgacgtagagactctcaaaaaaaaatagtgtattagcacacatagaaaagtaaaactcaatcacaaggtgtctgtaagaaacacactttaagggaagacacaaacaggtccaaagtaaatggataggctgggtgcgcggtggctcatgcctgtaatcctagcactttgggaggccgaggcgggcacttgatcacttgaggccaggggtttgagatcagcctggccaacatggcaaagccctgtctctactaaaaatgcaaaaattagccaggcatggtgccacacacctataatcccagctactaggatggctgaaacaggcgaactgcttgaacctgggaggcaaatgctgcagtgagccgagatcacaccactgcactccagcctgggtgatagattaaaactccatctcaaaacaaacaaacaaacaaacaacaacaacaaaaagatggtgagtggctacatagtaaagagagggagggacatttcacagtaagtcagacaatgaagaagtcataataattataaatgtatgcacctaaaaacaaggcttcaaaatacatgaaggaaaatttggcataaggcataaacagtcagaatactcagtgccccaaacatggtaagatattttagcatccctctttgtgattgacaaaaccagaccaaataataatagtcatcatcatcatctagcaatgttaaaaccactataaacattcttttcaggtaaacttggtgcattccccatgaaagaccacatactgagccacaaagctggacacaatagaatgaaaataatgggaatcatacagattatgttccctaaccacattagaaaaaaagatatgaaatgaatgacctagcagccgggtgcggtggctcacggctgtaatcccagcattttggaaggccaaggcaggcggatcacctgaggtcgcgagctcaagaccagcctggctaacatggtgaaaccccttctctattaaaaatacaaaaattagctgggcgtggtagcggatggctgcaatccgagctactcaggaggctgagctgaggcaggagaatcgcttgaacctgggatgcggaggttgcagtaagccaagattgcattactgcactttagcctgggtggcagcgcaaaactctgtcataaaataaaatgaaatgaaatgaaatgaaatgaaatgaaataatgaaatgaaatgaaatgaaatgaaatgaaatgaaataaaataaaataaaataaaataaaataataaaataaaataaaataaaatatgtagggttctacctaaagaacctatatataaaagggtaaagtaaacccaaagtaagtagaaaaaaaaaagaaatagtaaaaataagagcagaagaaatgaaacagaaaagtaacagaaaatttgaagtcaaagctggtccttttgtcagagacctctgaaccagagtgcttctatcttgaacaggtgctgggtcaaataaggctgagtcctgctgggctgcattcccagtaagtcatgcattctaagtcacagaatgaggtaggaggctggcacaagatacaagacagaaaaaccttgctgataaaacaggttgtaataaagaagggagccaaaacccaccaaagccaagatggtgataaaactgacctctggtcatcctcactgctcattatacactaattataatacattaacatgctaagagacactcccacaagcgccatgagtttacaaatgccatagcaatgccagcaagttaccctatatagtctaaaaaggggaggaaccactagttctgggaatagcccacccctttcccagaaaattcatgaagaatccaccccttgtttagcatacaatcaagaaatactcataaaaatgggaaaccagtggcccatggcactgctctgcctatggactagccattcttttattcttttactttcttaataaacttgctttcacttgatgaatccgccccaaattctttcttgcatgacatccaagaacctctccttggggtctggattgggaccccttctggtaacacgttggaaagacctacaaagttgacagtctgcaagcgaaattaatttatttttaaataggaagaatacaaattaccaagaataaaaggggaattagctctacgatcccaaaggtattgagggccaaagattattattaatgacttcatgctaactaattcaacagctgagatgaaaagaagaaattctttgaaaacaaaacttatcaaaactgataaaacagaatatctgagaagcattttaagttgaattatcaaaatcctttccaaaaagaaaactctagactcagattttttcactgataagttccttcaaacactaaagaaaaaatagcatcaatctcacacaaacatttccagaaaacagagaagacaatgcttcccaaatcattttctaagttgagcatgaagaataccaatgcatatgccaaaaataccagcacctgacaaaaagcagcaaggttacaccaaaatccctcacatacaaagatgcgcaaatatttactattagcaatttaaatccaacaatatattaagaggaataggccagttgcgatggctcacacagattacgaaagtaatcctggcacttttggaggccaaggcgggaggatcacttgaggtcaggagacctgcctggccaacatggtgaaaccttgtctccacgaaaaaaattagctgctcatggtggcacatgcctgtaatcccagctactccggaggctgaggcaggagaatcacttgaacccaggaggcggaggttatagtgagcagagattgtgccactgtacccatctccaaaaaaataataataataataatacaccatgacaccaaatggcatttagtataacatttgaaaataaaacaatgaaatttacattaatatatttaaatatatagcattatctcaatagatacagaaaaagcttctgagaaaactcaatatccattcaggacataaaccctcaggaagctagggctagaccttactcaactgtgtattctccatggcatggcatgattattcctcttagggtctgtgactataactatcttttcaatggcagttatgttgggttctgttgtccttgtcatatctaaacagtaataaaacctatatttgaaaacaatctgataaagttcatcaataaaacccctacagctgacttataattagtggtgtaacactgaatgctgtattcaaagaatgaaaacaagattaagtcaattctgtgagggaagagaataaaaggcattacaactagggaaaaaaagagataaaactgtgttttatgacaatcatctattagaaaaatctaagaaatgtacctaaaaaaactcgtagaattaatatgacttaaggttgtaagaaacgggtcaatatacaaaaattctatttccaacaaaaaattagaaatttttataatacttcataattgctgaaaaagtatttaatattttaaaatacaaatagcatcaaaaaaagacaaaatacttaaaaataaaaataattttaggccaggcgtggtggctcatgcctgtaatcccagcagtttgggaggccgaagcaggcagatcatttgagatcaggagttgaccagcctggccaacggggtgaaaccccatctctactaaaaatataaaaattagttgggcttagggtacatgccagtaatcccagctgcttgggaggctgaggcaggagaattgtttgaacccaggagatggagtgagccaagactgggccactgcactccagctaggcgacagagtgagactctgtctcaacaaaaaggaaaaaaaataagtaattttaaaaacagaagacatgcgagaccaaaggctaaaagcaacaaacgactgctcagacaaaacaaaaaagacctaaataaatggagagatatactatactaatgactaagactcagtggttgttaagatgtcagttctcctcaaactgatcaacagattcaagacaattacaatcatgatcccatcagccttttttggagaagacagaaaagagatgattaaaatttatacggaaatgtgaaggacgtagagtatgcagaacttcgaaaaagaagaaaaaggttttaggacttgcaattctgacttcaagacaatataaagttaccaaataatccgaatactctaacagggctagacaaacagatttttgaagcagaataaagatttctgaaagagatcccacttaggcagccacgcgatgttcccaaagcaacccggtgagaaaaggagactcttttcaacaaatggtgacaaacaactggatagccacatgcaaaaaactcagacctacaaaaataacttcagacgcatcacagacctaaatataaattagcaaaagcaagcccttttacaggaaacaaaggaaattaccttcaagactttgaggttaggcaaaagtgtcttagctcacagtaagcaataactacaaaagaaaacactgataaattaaacctagcagatataaatatttctgctcatcaaaaggtacagttaaaataaataggccgggcgcggtggctcacgcctataatcccagcactttgggaggccgaggcggacggatcacgaggtcaggaggtcgagaccacggtgaaaccccgtctctactaaaaacacaaaaagttagccgggcgtagtggcgggcgcctgtagtcccagctactcgggaggctgaggcaggagaatggcgtgaacccgggaggtggagcttgcagtgagccgagatcgcgccactgcactccagcctgggtgacagagcgagactccgcctcaaaaataaataaataaataaataaataaataaataaatgggtaaaccacatagacttggggaaagtatttacaaaacatttgtctaacaaaggatgagtatttaggacatataaacaccttctgcaactcaaatagatgaaaaacgaaaacaaagaacagtaaaggcaaaatgaacaaactcatcacaaaagagaacacacaaatggccaacacacaagctaaaacgtgctcaatatcaccagttatcatgaaaatgtaaattcaaaccacagtgataccacttctggtcaagatggagtgaataaaggggaccagatttagcctccttgcgtgaaataataaaaacctaataaaatgaatgaaacaacagcactgaagatattggacaagtaacaaaagacagtgatccctggaagacaaaaaacaaacgggccacacgtgtgcccagcttactgccttgagagagttttccaggtcgtggaacagggaggaggaacccaggcagagcctgtcgtctccccaagttgaggaaatggagctggaagtccaaggaggccaaggtgcctagagctcacaagggagaccagcactgagtagagagctggagagagagagagaaatgaagagatctacaagggctcaccctagaacttttggttgaatgacaaatcagcacttgcaatgtaaaggagctgtccaagggcaaggtgagaaatcaccaaaacaattagacgtaatagcatccaggactgacttaaggaggtgtatagtacccacacccaaaagtccaaaaggaaatgacgtgatataatttatatcacattggagatgtgacattggaatactaagaaagaaaaggcttcagaaggaggaaaaatttaaccctaaacacaaccctggtccaatcaaggaaaacataaaagacccaacagaaagaaactgttttcaagcaacttaataatgccacagaacaaagtccacaaatatttttaaaaggcaaacaaaactagagaaactagaaaacaaggtaaaattcacactggctcaaaagtcaatccaaatttataagacttacatagaagcaggaaattataccccataatgaaacaaaaaacaaaccaattttgaaatgaaacagaaaatagaattggtagacaagtcctttaaaacaattatgatgatatttcatatgatgagaaggctagaagaaacaacatattaagtaaaaatatgaattatttttaaaatttgaacttctaaagatgaaaattacaaagtctaagatgaaaaatacaccttgaaatttgcaacacatgaaatcaaaattactaacctaaatgaaacacagaaaaaaacactaaaaaatgtaatacgtgataattgaaataacttcaagaggccaaacatatttgtaactagagccacaaaacaggagataatattgaaaaaaaatttttagaaatcatggccaacaacttttcacatatttgagggaaattataagcatatataacaaggcactcttttaatgaattatcattcgctagaaacatgaagaaaagtggctgagcgcagtggctcatgcctgtaatcccagcactttgggcagccaaagtgggaaaatcgcttcaggccaggagttcgagaccagtgtgggcaacgctgcagaacccatctctaaaaacatacatacccccccccccccacacacacacacacaccacacacatgaaaaatggcctggcatggtggctcacgcctgtaatcccagcactttgggaggccgaggtgggcaggtcacctgaggtcgggagttcgagaccagcctgaccaacatggaaaaaccccatctctaccaacaatacaaaattagctgggcatggtgactcatgcctgtaatcacagctactcgggagactgaggcaggagaattgcttgaacccgggaggtggagattggggtgagccaagatcgtgccattgactccagcctgggcaacaagagcaaaactccgtctcaaaaaaaaaaaaaaagaattagccacgggtagtggcacacacctgtggtccttccagctactcaggaaggctaaggcagaaggaggtcaaggccatagtgagccatgactatgccactgcactccagcccaggtgacagagtaaaagcccatctccaaaaaacagggtaaaccatgaccaaaatgactacaatcagaaattaaaattccagtgcagccaagaaaaagatcttattacacactacaaaatcaaaagaaagttgaaatcgttataatactatcatgtaaagtggacaaaaataaaaattttatcaggaaaaaagagcatcattttatatacattaagggtttaattcatcaagaacacacaaaaatcctaaacatttatttacctattaataacagggcttcaaaataaataaagcaaaaatgagagaactgtaagaagaaatgaaagaatccacaattatattttaaaatttcagcaaacctctctgtgtaatagaaccaggccaggcatggtgaatgacacttgttatccctgaactttggaaggccgagacaggattgcttgatcacaggagttcaagaccaacctgagcaacacagggagaccctgtctctacaaaaagagttttaaaaattaactgggtgggccaggcgtggtggctcacacctgtaatcccagcactttgggagccagaggcaggcggatcacctaaggtcagcaattcaagtccagcccagccaacatggtgaaaccctgtctctactaaaaattcaaaaattagccgggcgtggtggcacacaacagtaatcctagctactcgggaagcttagataggagaatcgcttcaacccaggagatggaggttgcagtgagccgagatcatgccactgcactccagcctgggcgacagagagagattccagaccagcagacagaaaatcagtaaggatacagaagcttgaataacaccaaactgacctaactaactttagaacactctacacaacctaccagaatacacattctgttcaagtgcatttggaacattcaccaagatataccatattcgggccaaaaaaaacaactcttggtacatttaaaaggtttgaagtcttatcatgatttttttcttaccactatgatatttagaaatcagtgacagaaaaaaaaatcaataggcaatccccatatttgaaatcaaaacatacttttaaaataaccaatgggggccaggagctgtggctcacgcctctaattccagcactttgggaggtcgaggcaggtggatcacaaggtcaggagttcaagaccggtctggccaagatggtgaaaccccgtctcttctaaaaatacaaaaattacccgggcatggtagccggcgcctgtaaccgcagctactcaggaggctgaggcagagaattgcttgaacccgggaggcggaagttgcagcaagccaagatcacgctgctgcactccagcctgggcgacagagcgagaatctgtctcaaaatataaaataaataacataacataacataacataacccataacaccaaggggtaaaaaaaggacaaatatatcaagtattttaagacagttaaagcagtgattgaaagagaaatttatacaattacatgactatattagaaaagaaacaaatcagtgacttcaccttgttccttaagaaactagaagagcaaaagaaagatcgagcagaagtcaatgaaatagaaaacagaaaaatagggcacactcagtgaaatcaaaggttagacttacacttctgggacgatggaatggacatacttttccctattcctcccactaagtacaaatttaaaatgtgaacattgtaaataaaacgaatattctctgaaaggtggagagaaggcaaattagctcaggatcacaggacacaaggcacaatatagcagtaaattccctgggtattcttctttttgcctaatgtatcctactcctggaatggaagaagtgagtacatcaggacaccgatgaacacagaccaaaaaaaaagaatccccaacagggcccggcgcgatggctcacgcctataatcgcagcactttggaaggccgaggcgggtggatcaccagaagtcaggagttggagaccagcctggccaacatggcaaaaccccgcctctactaaaaataaaaattagctgggcgtgttggccggtgcctatagtcccagctactccggaagctgaggcacgaaaatcgcttgaacttgggaggcggaggttgcagtgagcagagatggcgccactgcactccagactgggtgataaagatggtctccaaaaaaaaaaaaacaaacaaaaaaactaaaacagttgtttaagtaagatgcatagtctcatgacaacacaaaaatgcccaggtttcaatcaaaagttatttgtgataccaaaaagatatgaagaatccagaagatttcaaattgaatggaaaaaggcaataaacaaatgcaaacatcaagatatcttaattctaatatctcacagatacatcagaattaactgaaaaaattttttgtttgtttgttgttgctttttgtttgtttgtttcttgagacggagtctcgctctgttgcccaagctggagtgcactggcatgatctcagctcacggcaagctctgcctcccaagttcaagtgattctcctgcctcagcctcctgagcagctgggattacaggtgccgccatcgctcctggctaatttttgtatttttagtagagacgggttttcgccacgttggccaggctggttttgaaccccggaccccaggtgactaacccaccttggcctcccaaaaacaatttttaggccgggcatggtggctcacgcctgtaatctcatcactttgggaggccgaggtgggtggatcacctcaggtctggagttggagaacaacagcctgaccaacatggacaaactccgtctctactaaaaatacaaacttagccgggcatggtggcacatgcctgtaatcccagctacttaggaggctgaggcaggagaatcacttgaacctgggaggcggaggttgcagtgagctgagatcacgccattgcacttcagcctgggcaacaagaacgaaagtttgtctcaaaaaagaagaaaaaaaaattcagcggaacaaatatccaaaccatatcaatgaactaaaataagcagatataaaatacaataaagaaaaatggttttggcgtagtgaattggggtagaaaaaaaatacgacaagaaaaatgggattccaaaaatgttcaagtaactcaaaagaaagcaggaaaaagaacaatcaaaaaactaaaactaaaacgaggcgtggtggctcagacctgttattctagcactttgggaggccaaggtgggtgaatcacctaaggccgggagttcaagaccagcctggccaacatggtgaaaccccaactccactaaaaatataaaaattagctgggcgtggtagcacatgcctgtaatcccagctacttgggagactgaggcacaagaactgcttgaacccgggaggcagaggttgcagtaggccaagattgagccactgcactccagcctgggcaagagtaaaactttgtctcaaaaaaaaaaaaaaaaaaaaaaaaaaaggattctgacaacatctgtaagtatgtaaatggcccaaatacctaaaaacagcaaataaaagacaaaaactggccaggtgcaatggctcacaaccataatccaagcactttgggaggctgaggagagcagatcacttgaggttcggtgttcgagaccatcctggccaacatggtgaaaccctgtctctactaaaaatacaaaaaaaaaaatttaggcagtcatggtggtgggcacctgtaatagctactctggaggctgaggcaggagaattgtttgaacccactaggcagaggttgcagtgagccgagatcataccactgcactccaccctgggtgacagagtgatgaactccgtctcaaaaaaaaaaaaaaaaagaaaaagacaaagattgacaaactagatttaaaaaacataacctacagccaagcatggtggctcacgcctgtaatgccagcactttgggaggccatgacagaagggtctcttgagcccatgagttcgagaccaggctgggcaacataacaagacctcgtccctacaaataataaaaaaattagccgggtgtgatggtgcacatgtgtggtcccagttacttgggaggctgaggtgggggaattgtttgagcccaggaggtccaggctgcagtaaaccatgattgtgccactgcagtccagcctgggtgacagagcaagaccgtgtctcaaaaaaaaaaaaaaaaaaaaggccaggcacagtgactcacacctgtaatcccagcactttgggaggccaaggaaggcagatcaagaggtcaagtgttcgagaccagcttggtcaacatagtgaaacccggtttctactaaaaatataaaaaattaaccaggcatggtggcgggcacctgtaatcccagctactcgggaggctgaggcaggagaattggttcaacccgggaggtggtggttgcagtgaaccaagatgacgccattgcactccagcccaggtgacagtgcaagattccatctcaagaaaaaaaaaaaaaagaaagaaagaaagaaaacataacctaacactgttttgtgtacaagacatttacttcgaatataacaatctaagcacattgaaagcaaaaaaaaaaaaaaaattcaaaaggtatatgatgcaaccattcactaaggaaaagtggatgactatattaatatcagaaacagtatacttcagagcaaagaaaaagtactagagactaagaaggaaattatttattgagagaggggtcaatccaccaagaggacataacattcctaaatgtgtatgcagcaaaaaaccagactacgaaatctgtgaaagaaaacctgatggaacagaatgaagaaatacacaaatccactatagagacttcagtatttctctgtaacaactgttaaaactatacatatgatcacagcaagagtatttacttcaaccccatgaactaactggatccatggacatttacaggacattccacccagcaagagtggaatactttttttttttttttgacagagtctcactctgtcgctcaggctggagtacagtggtgcaatctcagctcgctgcaacctccgcttcctgggttcaagcaattctcctgcctcagcctcccaagtagctgggactacaggcatgtgccaccatgcctggctaatttttgtattgtttttgagtagagatagggagactccgtctcaaaaaaagaaaatagccaaaagtgatgaacaggggatatataaaggtactactgcttgtctcagcagcacatataccaaaattgaatcaatacagagaagattagcatgctccctgcacagtgatgacatgcaaattcttaaagtgttccatatttttaaaaaaagataccaaataagcacccgaaaagatggtcaacatcattagccactaagtaaatacgtattaaaaacacaatgaggtgtgtgtagtggtctgtaatcccagcactttaggagaccagtctggagcatgacttgagctcagaagttcaaaaccagcctgagcaacatagcaagaccttatctcttcaaaaacatatttctaaaaacattggctgggtgtagtgtagcacacacccatagtcccagctactcagagggttaaggtggcaatgagacatgatcatgacactgcccttcaaagcctaggtaacagagcaagaccctgtctcaaaaataataataataataataataataatacacacaatgagatatcactacccacctatcaacattactaaatgaagacttacgttcacatgaaaacctgtgtgatgtttctaacagttttattcataataacctacaagtggaaataactgagattatctttcagcaaataagtaaacaaagtgcagtataaccgtaacaaacactaagcaacaacccggaggaatctccaaggaattaaacttagtgtaaaaaactcaatcccagaaaattacatgttgttttgttttgttttgtttttagaccagaatctcattctgtcacccagggtggagtgcagtggtgcaatctcggctcactgcaacctccacctcctgggttcaagcaattctcatgtctcagcctcccaagcagctgggattacaggttaatccctgtaatttttgtattttcagtagagacagggtttcaccatgttggccaggctggtttccaactcctgacctcaagtaacccacccacctcagcctcccaaggtgctgggattacaggcgtgagccaggcacctggccttcagaaaattacaagttctatcatcccatttatataacatccttgagataacaaaattaccaaaatgaggaatacattagcagttacgactaagtctggcggcaggaggaaagcaggtgtggctataaaagcacaacaggaagggagaggattctgggaagatggtgcaataggaagcaccaggaacctgaggtcgggagttcaagaccagcctggccaacatggacaaaccccgtctctactaaaaatacaaaattagtcgggcgtggtggtgcatgcctgtaatcccagctactcaggaagctgaggcaggagaattgctccaatccaggaggcggaggttgccgtgagccaagatcgcgccattgcactccagcctgggcagcaagagtgaaactccatctcagaaaaaaaaaaaaaaaaaaacaagtatatataagtcagcaatgaagaaaatgcaggacttgtacacagaaaaatcataaaactttactgaagtaaactgaagacaacatatataaatggaaagacatttcatgttcttggattgcaacaccttaatgttgctaagatgttactactccaaagcaatctacacattcaataaaatccctgtcaaaatcccaagaatgttttttgcagaaattaaaaaaaaatacattctaaaactcatgtagaatctcaagggacctcaaatagtcaaaacaatcttgaaaaagaataaatttgaagacatcacacttcgtgatttcaaaacttactacaaagctacagtaatcaaaacagtgttgccaggcttggtggctcatgcctgtaatcccagcactttgggaggccgaggcggacggatcacctgaggtcgggagtttgagaccagcctaatcaacataaagaaaccccgtgtctactaaaaatacaaaaattagccgggtgtggtggcacatgcctgtaatcccagctactcgggaggctgaggcaggagaatcgcttgaacccaggaggcagaggttgcagtgagctgagatcaggccactacactccagcctgggcaacaagagtgaaactccacctcaaaaaaacaaaaacaaaaacaaaacacagtgttgtactggcataaaaacagagcactgaaagagaatagagagttcaaaaataaactctcgcttatatggtgaagtgattttcaacaaaagtgccaggatcattcagtgggaaagagactcttttcaacaaataattttgggaaaactgcattatctacatgcaaaagaatgtaggtggacacttctcttacaccgcacacaaaaattgactcaaaatggatcaaagacctaaacataagagctacatctggtggccgggcgcggtggctcacgcctgtaatcccagcactttgggaggccgaggcgggcggatcacgaggtcaggagatcgagaccatcccggctaaaacggtgaaaccccgtctctactaaaaatacaaaaaattagccgggcgtagtggcgggcgcctgtagtcccagctacttgggaggctgagccaggagaatggcgtgaacccgggaggcggagcttgcagtgagccgagatcccgccactgcactccagcctgggcgacagagcgagactccgtctcaaaaaaaaaaaaaaaaaaaaaaaaaaaaagagctacatctgggccgggcatggtgactcacacctgtaatcccagcatgttgggaggtcgaggcaggtggatcacgaggtcaggagatcgagaccatcctggcaaacacggtaaaaccccgtctctactaaaactactaaaaaactagctgggcatggtggcaggcgcctgcagtcccagctattcaggaggctgaggcaggagaatggcgtgaactggggaggcagagcttgcagtgagctgagatcgtgccactgcactccagcctgggcaacagagtgagactctgactcaaaaataaataaataaataaatataaaaataaaaatgtcaacaaatttgctcaactataacagaaaaagaaagcttacaagagaatgtagagctcatagtttctacttagtgtttgttagatagatggtttaaatggactgaaaatcctgaaaaactgcttgaatcataaagaatctttgaaatattatggaagcattttctagcttgtttctgaaacctctgaaaaaaacctcctcatgtatcaatacaagctaacctgctttacagaaatcagaagaaaaccatggctgggcacggtggctcacgtctataatgccagcactttgggaggtcgaggtgggcggatcacgaggtcaggagttcgaggccagcctggccaacatggtgaaacccctgctctactaaaaatacaaaaattagccaggcatgctggcaggcgcctgtaatcccagctccttgagaggctaaggcaggaaaatagcttgaacctcggaggcagagattgcagtgagccgagatcgcaccactgcactccagcctgggacccagcgagactctgtctcaaaaaaaaaaaagaaaaaaagaaaactatgtattttattacatgtacacatttgtctttcatatacttgtaactcagaaaaccatgctttcacaaatgtaataatagaaatacaataatattagcaatcataacatttgtgaaagtgtaaagaataaactggtcagatgctgtctcttacaccctagaacccaggttctggtcaaggcttgtcttggttgtatgaactcacttcatggacctgtcataaggctcaaaagagatactgtaaacaaaagcatcttgtaaactgcataagcctgtagatttgtggtccatctaaatccaggcactttaacgactgatagctgtccccccagaacctcctttctcgattcttaacataaacaacttatacttccaagtccagttcaaaagttatattcttggaagcctccacgtccctcctgtccatccaggcagaactaatccatctacactctagtattatgctctcataactcttggctcttccccagttcattcaagagtgtaacgagcagttaaaatatgtcagacatcatgctatgcactggagaaaaaatcttaaatgtgtgaagcttacaaagctttttcacacacattatctcatttcatactttaaaaatatcccataggatcatgattatgtgtttacaatttctctaaccagaataaattcccagggggtagagactaagtgtgattcatctttgattccccagagtctaatgcagtgtctggcacccagaaggcacccattaagcacttgataaatgaatgagtaaaggagtaacaaacacttgttcgattactaaaatgtcaatcagggttaacactgaaataatctttccacaaagtttccacaggggagaggggaaaaatacattatattatatacaaacacatctggggagcgaaaattcctccctatagcagagcatctccaactcaagtttaactgtttaacaaagccacatagcaactgaggatggatttgattttactactggactaacaagctcttggtgaagaacaatgagttctgcataaaagctcctatgtagatcattctgcttggtaaaactggacattattacacaaatattaaaataaatacttaaagagcttctgcacagcaaaaaaaaaaaaaaaaatcatcagagtgaacaggcaacctacagaatgggagaaaatgtttgcaatctatccatctgagaaaggtctaatatccagaatctataaggaatttaaacagatttataagaaaaaaaaaccatcaaaaagagggtgaaggatatgaacagacatttctcaaaagaagatatttatgcagccaacaaacatatgaaaaaaagctcatcatcactgctcattagagaaatgcaaatcaaaaccacaatgagataccatctcacgccatttagaatggtgatcattaaaaagtcaggaaacaacagatgctggaaaggatgtggagatacaggcatgcttttacaccgttggtgggagtgcaaattagttccatcattaccaaagactgtggcgattcctcacagtgaccaattgaaattatattttacatgtaataaaaccattttctatttacaaaaatcaaataaattctcgtaaagcaaacacgcctccatttatttcccactttttgcacaaaattggattttcactgtaactgaggtgtgctaaatgcatggttaatctagtgtcagcatcatcttcctataaattacagatgccttctgtgagcaggtctcctgcaggctcatgtatgttgtattttgaaatctactttagaggatattttaagacttttagaaccagaaataccatttgacccagcaatcccattactggctatatacgcaaaggattgtaaatcattctactataaagacacatgcacatgtatgtttattgcagcactatttacaatagcaaagacttggaaccaacccaaatgcccatcaaggatagactgcataaagaaaatgtggcacatatacaccatggaatactatgcagccataaaaaagaatgagttcatgtcattttcagggacatggatgaagctggaaaccatcatctcagcaaaccaacacaggaacagaaaaccaaacaccacatgttctcactcaaaagtgggagttgaacaatgagaacacatgggcacagggaggggaacatcacacaccagggcctgtcaggggatggcgggcaaggggagggatagcattaggacatatacttaatgcatgtggggcttaaaacctagacgacaagtcgataggtgcagcaaaccaccatggcacatgtatacccatgtaacaaacctgcacgttctgcacatgtatcccagaacttaaagtataattttaaaaaatttaaaaaataaaaaataaaataaagtcttgtttcagggtaatattaatttgcgttaccacctatttcaacacggcagacaattgtaccatctgagacaaatggagctttgacatgaaatcttaaaataccccataaatggtggccgggcgcggtggctcacacctgtaatcccagcactttgggaggccgaggcgggcagatcacagggtcagtagatcgagaccatcctggctaacacggtgaaaacccgtctctactaaaagtacaaaaaattatcggggcgtggtggcaggagcctgtagtcccatctactcctgaggctgaggcaggagaatggcgtgaacccgggaggtggagcttgcagtgagccagatcgggccactgcactccaccctggtcaacagagccagactccatctcaaaaaaaaaaaaaaaaaaaaaaaaaaataccgcatgaatggattgatagacaaaaagcgaaaaaatccaatgctaccagctctcataagctcaaaattcaattctctactctacaaaaatccctggtataagtgagagatatacttcaagatctttgcatattccaaagtttatggctattactgccacagagcttcttccataaacttcaaacgtttgcactgaagagcactgtgtctggggactactttactatcactagcttcataatggtgttttctccttggtgtaatatttcacaaggagacaaagaatacgtatgtgtgtatgtgaatcattcatgctagttaccacgtaaataacaacaagcagcaaatacgaagttaaaagtgaagttgcagtgtaaatgctgctgtccagatgggtgaggcttactcatccgccaagcgaagtcctcaacctcgcctccaccgcacacagcgttcaagtttccatctcaacagaacttacgcatcatgaacctttacggttcataaacagttgagaaagctaacatcaaattcttgcatgccaagagtctacaaattattccattcacagatgttataatcggatttttttttttttttgatacggagtcttgctctcacccagactatagtgcagtggcgcgacctcggctcactgcaacctccgcctccggggttcaagcaattctcctgcctcagcctcccgagtagctggaattacagacacgcgccaccatacccgctacttttttgtatttttagtagagacggtgtttcactatgttggccaggctggttttgaactcctgacctcaagtgatccgcccacctcagcctccccaagtgctgggattacaggcgtgagccacctcgcccgactctgatcattacttaattaggataaaaccattccttagaaaggtcattcaattctgatgattgtatatctcatatttttcaaatactctcattgttaataagcatttcactccactaaggctaccctggcatcaaacgtatttcagatttggccaggctcggcagctcatgcctgcaatcccagcattctgggaggtcgaggcgggtggttcacctgaggtcaggagttggagaccaggctggccaacatggcaaaaccccatctctattaaaactacaaaaaattagctgggcgtggtggcaggtgcctgtaatcttagctactcgggaggttaaggcaggagaatcccttgaacctgggagggagaggttgcagtgagccgagattgcaccccactgcactccagcctgggcgacagagcaagactccatctcgaaaataataataataaaatacagtgaggtggttttttttgtttggttggttttttggggggtttttttgtgttttttttgaccgagtctcgctctgtcacccaggctggagtgtggtggcgcggtctcagctcactgcaagctccgcctcccgggttcacgccattctcttgcctcagcctccctagtagctgggactacaggcgcccgccaccacgcccggctaattttttgtatttttagtagagacggagttttaccatgttagccaggatggtctcgatctcctgacctcgtgatccgcccacctcggcctcccaaagtgctgggattacagacgtgagccaccattcccggcccaacacaatgagttttaatagacagagtcaggtgacattcatctatctagtcctacacgccattttggcattgaagggttccacagggctggagtcacttagctctaggtgcacaattctagtgtatgagtatacttttctattctaaagccgcaatgagcaaaatgggtcagtgtaattgtagaattcatcttctacatatcaagcactgtaataggtaaacattttatatacatcctctctaatctttgcaacattccacaaagtaagggttattttacccattgaaaaatcactggaaagtcagaggatttagggccattgcccccaacatctacagcccacaccaagatttgaacccagatctctctggtttcaaaaccctgccctaatcatttcactgtattaccaatccaaggaataaataaagttaaggtatcttagtcagataaaagtggcaaattagaccaggcgtggtggctcacgcctgtaatcccagcactttgggaggccgaggcaggcagatcacgaggtcaggagatcgagaccatcctggctaacacggtgaaaccccacctctactaaaaaaatacaaaaaattagtcgagcgtggtgacacacgcctgtagtcccagctactcgggaggctgaggcaggagaatcgctcgaagctgagaggcagaggttgcagtgagccaagattgtgccactgcactccagcctgggtgacacagtgagactccatctcaaaaaattttttaaaaatgtggcaaattaatgagaggaaaatttaaaaagttaaccccacaaaccaagaaatctatttatgattatgtttgttgtaagagacagagtcttgctctattgtccaggctagtctcaaagtcctgacctcaagcaatcctcccgactcagcctcctgagtagtggggattataggcgttacaggcatgagccaatgcccccagcaagaagtctgtatgttcttatcatacgtgcgactaaacaaaattatacttaagaaactgacaaatcatggtaatattttaaatatcatgactacactgaaaccctgccagaggtatttttaaaatgtcaaggatttttttgatttttttttttttgagacagagtctccctctgttgcccaggctggagtgcagcagtgagatcttggctcactgcaacctctacctcccgggttcaagcaattctcctgcctcggcctcccgagtagctgggatggcaggcacgtgccgccacacccggctaacttttgtatttttagtagagacggggtttcaccatgttggtcaggctggtctcgcactcctgaccttgtgatccgcccacctcggcattcccaagtgctgagaatacaggcgtgagccaccgcgcccggccaaaatgtcaaggatttttacgctgatgtgcttaatgtgcccaatctgcaattctagtggtaatcagtgacatacccataaatcagagagtacttctatgaaaataatcacagcctacaaatacggataaaactcctcagctttacctcttagatggttctagacagtttcagaattcgtgcctctttcttcaactctctcattaattttattacccttggcagtaaaataatcttaccaattgctctccctatgaaattgtgaatgaaaattcccatttctctttgctaggtcttgttagctgccatctctgggaaggagaaagtgtttttatagataggcatggcaaggacaaataatggagttgaaatgcaagggtggatggcaaataaattgcatcttgtgaactacctccaactaacttctgcctggagcactgtgtttaaaaggattcctaggccacatctggagggatccgggaaaaaaaaaaaacaaaagagatgtaacgaaggtaagcggagaaccagtaaagtgtagtgctacagtagcctagggtttcaaggaaaggagattataatatccagtcaggcagagcagcagtcaaacaacatgaagaaaaatgtccacgagacttggcatgtaggagatcactgatgtgcctattgacaagttcagtagcgttgtgagggaaaagtcaatgggctaaagcggaaatgagtgctgacacagagacagcaggtgtaaaccagagacagagccagtgtaccggatggctgaagtcaaatacttacgtagcaaatggggatagagacacgtgtccgatggatgtattggccttctcaggacaaatattccatcccctgaaaaccacaggaaaggggtaaagaaggatactcctataggtcaatttacagaagagagcaaaaccttaaaattgtcaacgaagtaggagctaagaacctctgtatcaggtgaagagacaggaaggtcaagacggggaaggagaagatttgctaaagatgttgaagagaatgagagaactaaacagggctgggcaagcaaaggcatcaggcaaggctgagtactcagatgaggttgaaattatgtaatagttacattaaaacagggttaatctgtatgactaggtgctttttctttagccttcagatacagaagtagaacaacagactgtggattgggctggcattttgccaggatacaccaggaagacgggcacaggaaaggcccaatgttgggagtatttccattaatctcctatgagatccaggctggctagggtagcaaggcaggttataagaagaaaaatacagacaaactcgtgagactgcagaggcttggaaggagaaaatgtgttgggtgacagtgagatgcagaagatttctaaggtgatacacctgtagaggagaaggtggaggtcccagcccggggaaaaggtggctaatctgcccctggtgatgaccactggcattaaaggaatccagaagagacgaggctttttctgtttgtggaagttatctccttgtccaagtttctcttcaccactgaaaacctctgaaagttgtcaacttcattaaggtagattcagaagacctgtttgattcaaaatgacaaaatgcttctagagaaaaagcacatatgtctggtcagataatgcgtgtatgacttcggacaaatcatagcatttcagtgtttgaggtaacctagtctgtctgtcctctttattccttaactctccatctgtacagacagaaacaatgtaatcagccacataacttgtatagaataaatatgaagagagaaccaattatgaaggtagaagttcttggggtgaggggaagaattttaaaatacaaaattaactagctacttcttcaagaagaaaaatatcagggagtactgaaagagaacaattgcagaaaggaagagaaattaacgtgaacagcaaccaaaaaccttctaagaatgtatcaacagtccagtggaaaacaaatacccaccctgatgacaccttgatcttggacccacggcctccagtactgtgagacagtaacattctgttgctgaaggtgcccagtctgtggtactgtaaaacagccctaggaaactaacacagcctgttagcccacagatggtggagagaaggaatgctcagtggagctccaggcttactgtctacagctcccaaagtgtgctacaggacccctggatgggtgtaggtatgcaagataattttgggtggtgcagggtgaataatttcaaatgacataaaaatgtgtttctcttactgggtaaatcaggggtccccacctgttaggaaccaggcaacacagcaggaggtgagcagccagccagggagcaaagcttcatctgtagaaacagccgctccccatccctcgcattaccgcatgagctctgccacctgtcagatgagtggtgccgttccattctcatagaacccaactgggaactgagcatgccagggatctagattgcgtgctccttatgagaacataatgcctgatgatctctgactgtctcccatcacccccaagtgggaccacgtaattacaggaaaacaagctcagggctcccactgattctatgttatggtgagttgtgtaattatttcattatatattacagtgaaataatcacagaaataaagcacacaataaatgtaatgggctcgaatcatctctgcaccatcccttccccttctcccaggtccgtggaagagttgtcttcaagaaaactgctctctggtgccaaaacgtttggggaccgctggtgtaaatgtttctaagaatagttaagcaacttaagcttcacatgctacgaagaatacagctttaaatgctaataaaaataggtgcaaatgaaaacattctttctgtggtccagggaatcttaaccattctatcagaaagacttgcagcttggagctgcagctgccctcccacatcctgtccgctgtaaagccctgcaacacacacatacaggcgcacacacacacacgcacacatgcacatacatgcacatgcatatacttgcacacacacatgcacacacacatgcacacagatgcacatacataaatacattcacatgtatatacctgcacacacacacatgcacacacatacacatgcatattcctgcaaacacacacacacacacacacacacacacacacacacacacgctgtgcttcatgccctcactagggtggcctgggaggaaatgcgtgtttttaggagaaatgaagacaactcaggcccctcattctcctggtgtttgcacaagtgccttctctgcagaccatgcttcagcctctttcttggttctccctcttactgaaagagagaagcagaggcccggcacatactcggctgcttagggctcaagccaagttcgcaagcttcctggggagcctagtgagatgaaggcactgcagagcctccccaaaagagtcgtcggcttttcgtggatccttgagcccaggaaggcgataggtgagacatcacagttcatcagaagacacgagcaaactccggcgagaaagggcaacggtcaaagattttattctctcggaaaagggttctcgggctgtaagcagcaggcagaagactttattgcacgcgtagttaggtgatggcgacctacggttttcactggggactgggatcgagagtgatccgacctcctactcatgctcgtctctccctgtctctctctttgccttttgtgtctctctgcctgtctctctcgctccttttcctctcagcctcctctgtctctctccttatctctcatcctctctctctctatctcactcccttctccccatctctctttctctctccttcttttccacttctctcaccctcctcatctctctgcctgccactgttcaggctcctggggccccacgtggatgggcggacacaggactcctaggctacctttcatagcgcaagcagagggctgcaggaccttggtccccacctcccagcatcctcaaaatgaggggtgtggggtgtgccgtgctctcctgagtgggcgccccacactccaggaagcagaaactgcaggtcacagctggctcgagtggtgcccacggggctgccagcttccatcgtgtgatctgctgaggccaaagcagaggacagcagcccaggcccatctctgcagcagggtgggggtaggggtgggcttgggggtggggatggggatgggagccgccaatgcaaactggcccctggctggtttcctaccctgcaccctgccatgcaagtcctcctctcctacccctacccctgtctgccccacctccacccctaggctgccccacacccaggctccagaagtctcccaggatccaggaagtaagggcagcctctgggttccatagcccctagtccatgagtcagccacccctctgcgtgctgacaaaccttggctctcatgccccaccccaagccaagcacacagccctgtccccccaccagcattatcaccgcctcctgattttggccctgacagccctgcttcctggtaaccttgccccctcccaccctgctccaggctagcccaaaggccaggccctccacccacccttcctgggggccactctactatctccttgcccagatgtcttaacctggctttaccaagatagaataaataacagggatgaggccccggaccccgccaggaagatgtgccaaaataccctccatttagaagcgggaacagtgatggggcctatggatgaccccaggattgtcacccaagcagcaagaagggcaaggagcccggtttcctgcccttacctggggaggacgtggccagggctccaaaaggccctggagaggggtgggcaggagagcagatccaccctcctcttgaggaagcagccaccatccccaggaagagcagatgggggcacacaggcagagtccccacgtgctgtagagcaggaccagcagaactgtactcagccccagccccaggggagctgcaagatagactgagaccctcacaggttgggctctgtgtccccacccaaatctcatctggaattgtaatcctcctgtgtcaagggaggaacctggtgggaggggatgggatctggggacaggttcccccctgctgctcccctgatagtgcgggagttctcaggagagctgatggtttgaaagtgtggcacttcctgcttctccgctcactccctcctgccgccttgtggagaaggtgcctgcttccccttcgccttctgccatgactgtaagttccctgaactgggagtcgattaaacctctttcctttataaattacctaggctcaagtatttctttatagcagtgtgaaaacaaactaataccccttccctgaggcgccttctccttaggcaacccgctgcccccatgctcctcctctgccccctgttctttcttttcccctcatgaggcccaagtgataaacggggccagccccagccccagccccagccccagccccatcctactgcaggcctgtgtggctgctggagaggccgtgttcctttcctctccctgagcctgcctgatatgctttctggatcctggaggaaactgaccccctattctcatactggtgcaacatcttccaagacctcaaagctgtaccatttgagccagtcttttttcttatctccacttgctagggctgtcattgggacagtcctagagggtggtgccaatggatgaatagatggatggacagtagtccagggatgatgtccctgtctgtcctgaaccgggcccttcctccaatgagaagccttcctgagtgagtttatacagtcatcccttggtatccatggaggattagttctagggtccccgggaatgccaaaatccatggatgctcaagtctctgatataacgtggcctagtatttacgtataagctatgcgcatcctcccgtatacgttagaccgttactagattatttatgatgtgtaatacaatgcagatgctacataaatggtcgtgatactgtattctttagggaatgatgacaagaacaaagtctgcacatgttcaatagaaacataaccgtccaatttattttctgaatattttccatctgctgttgctgaatctacagatgcagagctcctggatacgagagccaagtgtgctttgagagtagggtgggtgaggttgctaatgagtacaggggagcaggtgttgatcaggaggaccctgcactggggcatctggacgtcctgcctcaggacttgagactccagttggatggcacaggcagactcagcccaggtcaaagccgtccccttgaagtttctttttatcccaagctctttctggcccctggaatttggcatcccctaggccctgtgtggaaggacagatgaaccaggttttagataacatgtctagaagagtgagcccctactgtgtgcccggcactttccccacaggatcctctagctagaatatccaagggtcatggagagaaatacccagttaaaatatcagaaatgaaaaagcgataccattagagacactaaaaagaccattaggtaatagtactagcttttgtattctgagatccaacagcagcagtcacttccctccaccgctatgtgtatcccaggaccaccctgggcagggagggctgaggttagggagcagccatggatgctctgatgctggccctgggcctcgggggtgacagtgatgaggaactgggtgcacacatgagtggggcagccgggcctggccagagaagcagcacacacgtgcacagatgtgtttacccacatacacatgtgcacgcacgtgcacaaacacattgcaggcaggcatgttgacgcctcaggcagcggaggaccctgactctgggcactgctgacccgggcaaggccccactgtgattcgtgccatgacctcagaatgtcactggtgcttagcacctatctgctctctggcctgcgtcagtggtctacagcagttacacacaggcagtggtatctgtgagcagctctgtggactcaaaggttttctccctgagaggcatgacccaggccagctgattcatcagaatcaggtgagcgtgacctgctctcttccctccaggcggacttgggggcagtggctacggtgcgggcggtgttggcctctgtggggcagctaccgaggagggtcatccctgagcactcaccaggcgcccgttctacactgcccgtgtagacgattggctctttcgtctccatggtggcttcgtagagtgggtgctgttcccaaatgtccccattcgacagatgagacgtctggggtcagagaggcagtaaccggcctgggaatccggacatgaccctgagttttgctctcagccctgccgtgtgctgtgctggaattcaggcctgaaccctgtgacctccctgccctagatcccaaatctgcccaggtttcccatcccgatggggcagagcctggtcctggcagagccactggtatagagccactggtacagatccactgacggtcctcagaacacctctgtgccctaagctgggtcctgatggtcgctgtgggccccactgaacacacatggtcccttgtccgggggagcctgctgcccttgggcagctgtggaaaatgaaggagccctggagggctggctgaggggagactatcttcccttgtgttcaaaggggtccgggcactagggttctccccaggtatttcttgctctgcgtggtcctcttgaggcctcgccctccttttgcctcgagtattcccaggagggacggtccatccagctgttctccaggaccaaggacccactgttcttcctcagtgacccaggaaaatgaagcctcctcctgttgggacggctcagaatggtggactccacagtccctccgcgagagacgtggtttccatgcgtacaatagatcttcctcatcccccaaacccaacaccctcctgctcaacaggcgttattcctaaagtggcttcactgttcagactgaagagccacggtagccaaagtgatgagcggagtagaaccgagcagtcgggagagatcttgttccctgtaggaaactgggcatcgctgaggccctgagcatcccaggaggccgattgcacagagacctctggtcgctgaccccagtctgcctccacatccctggaatagcccatcatgggcccttcacccttggcaggtggaaaccattcaacctgctggggccggtgtgtccccatttcatggcattgggggacaacaggattctctgtctaggtcccactgtactcaagtccttgggaagatgcccacccctgcttgggacttgagactccagagactggagcagctgtgggccactgggtctggcccctttttccctgggggcggcggtggaatgggggttacgcagccagccagcatctgggagcccggcgagagcggttcaggtgttctccgaagccgccgcgtacggtgtgacctttagacaattctgtctcacaggatggacgtggtagaggtcgcgggcagttggtgggcacaagagcgagaggacatcattatgaaatacgaaaaggtacaagtcggtctgcttcttggagggaggcctcttccagtgtgccctggtcaaagggtcctgggctccctaggagcacagggcagggacgggtggccaatgcccccaggcccttgcaccctttaccttggacccctcaccaaggctccctctgggctacagggacaccgagctgggctgccagaggacaaggggcctaagccttttcgaagctacaacaacaacgtcgatcatttggggattgtacagtgagtcctctgcactcccctcacccctaaagcacctgtctcagctcagggatgggtttgcttttagaaaggcctttctgacgcaggacatgtctcaccaggtcgggtcaacctcctttccagggacagaactcctccctgactcccctgcaggtccagcccgaggttgttaggccagaggtgtggggcccatctagggagccggtgggaatggagactgggctaggtcaggcccctgggcgctcagcagttctgtcggcaagtgagcacaagaggagcggggcagcctgagggtctggccctgtctacttggagacaaacccggtgagatgcaagggttatggccacagggtgaggggactcctggcccagcctcagggctgttgtgcagcaggtctctgagggcccacctgcccctgttctcccccattcccctagagctacagccctcactgtcccgtgaggggaaaaggcatggtgacaatgggggctgtagccctaggagaacgggggagaagatgggcagggccccgttctgggcatctcacggtgaggccagggaggcagcagggctcgcggctaaagacctgggtctggtgctgggaagggatctggggccgggtaagaggagcccagccaggagcccatccctcagggatcacaggatggagagacagaggatccctggggaggtagggcgggagggagctgacgagccgtgccacttctgaaacgcagggtgtgtggctcgggtgcagggagaggcaggtggatgctgggaggtcagaacctgcaagggccttggggctgtcaagtggggtgggcccctggtgcagccagagtacaccgggcaggtctcagggcaggctcccttgaccctggcggggggatgtggtcactccctgagggactcctgtcagggcccggtcgcccaccctgggcggcccccatcccatctcagggctaacctttctcagctccagcagaaagcaccacctcgagtccaggacgggcagccccattgggcagcctgaccgccccccacgccaggggccccagtaaccccggccaggctgtccctacactccttcttctcccaggtcctgcccctcctgggagtcagccccacaggaaggcccttgtcctcccttccctgtgccttctcctgggctgagccctgagctggaaagggacagagccagtcctttctgggggtcggcacccaggctggggccgctccaggccccgtgcagttcctcagctctgcctgggttgccttacagtgagacggagctgcctcctctgactgcgcgggaggcgaaggtaagagcctgatgcgtggaggggctggtccagggacgtagggactgggcgggtggtcagtgaggcagaggaagcagctggcctgagcggtggcgggtgagggcaacacgctgtcactgggaggggcagcagtccctgctggacctgaccccaggttgctgttcactttggcagtttgataaaattccaaaaggagaaccacagtcctggcttgggggtggctgcgcgcttgtgtcaggaccccacctagaggctgggacctaagactggtgtgtctgtggcctgaggatggtacatcccggggtcccaaagccagcccactggtgctcatttgctcaaaggctctcagcccttgaggtctgcccttccctggctccttccagctggctcccaccagggctccagagcccaagacccagcatccgcgggcggctctgggaagcctggcagctccgctaactccaacatgcctcatttgacagcaaattcggcgggagatcagccgaaagagcaagtgggtggatatgctgggagactgggagaaatacaaaagcagcagaaaggtaacgtgtggagggaggaagcactctctgcagagacaggggacaggcacccatggctgtggcctggcaccatcagcctctcagagggtgggcggcacactgtcctcgcccagaggactgcaggcctggtcgccagatttcctgcctattcgtgcaagcgtcaccttgcagggagggaatctgaatctagggctgggactacccggagctcaaggctagggatgccctggtgacctgaaggaaggaaaaggttcagatcagagtttcgactctgagtgtccatccactctttcagtcctgggaagggagaccctgtcccagcttgatctcacctctactgaggaatcatggggccaaaaccgacaatttccagaatccccgggctctggtcctcactggggtcaccccgtggcctgtgacaccagatcgttttctgcccacagctcatagatcgagcgtacaagggaatgcccatgaacatccggggcccgatgtggtcagtcctcctgaacattgaggaaatgaagttgaaaaaccccggaagataccaggtacgctcagccagagcacaacaaacaggacaggccgtgtcggggcccaggtctccagctggagggaacgtcaagaccaccctggggagctgggggtgaaggtcagatgaacaccctgggcacagatggtgacacagtcaccacagacaaactcagctctggtgaccctccctggcttcagtaacaagccaaaatgcagctttctgcagaaggaaaccttccttctgtccttccttcccgaagtgctgactgtgggctgactgccactgggggcagggagtcttccatctgttctgagactgcttcctcctcttggccctgccctacagatcatgaaggagaagggcaagaagtcatctgagcacatccagcgcatcgaccgggacgtaagcgggacattaaggaagcatatattcttcagggatcgatacggaaccaagtaagcctacgggagccacagggtcccagcagagatggggtgaatgagagggatgggggcttccccggagcagaagccagggtcacccaggagggatgacacagctgccaagagctctcccggcccagggagcagccggcaccatgaaccgagcacctccctggttccaagccctgggccagactggaacatgtggggccagaacccaggaggatcctgaggagatggaaggcagcaaacaaaatcatgcacaatggtgaagggtgctctccctgacccatggggacccatggtaggacccacgggagggtggcaggatagagggcccatgagccccccccaggcaacagtgacagcaccaaatgctgggagaattaggggtcctggaaactctcatccaggtccgctgggaacatgacatggcacagccacgttggcagcccgttgggcagtggctcacaaagctcgatggacttgaaccacacatccccaaagtgtcacagatattgaacccactgatttgcaaactgacatccacatgaaaccagcatgccaggttcactgcttgactcctcgtcactcacacacggagccttcggggacggccttcaacacggggatggggagagcaaggctggtcctcccttcaaacggaagacccagtgagaaaagggaacgagccggtgatgcccgcacgaacgtgggtggatcctagatgcattttgctgagggacagaagccagacccaataagctaccacagtaggattcccattcctaggccattctggaaaaggccaaaccacagggactgagaagcagtctgggtggccaggggctgacggatcggggagaggctgggtgcataggggccaccctggagacttggaggatgaaggagtcgccccaggaggggctggagcggtggccgggagactctgcacatcggtttggaaccgtggaggaactgtacacccacagactgaactggcgtgtgtgcaaactgaaaaaaaaaaaaaaaatcattcagagtgaaaaggatcaggcaagtcactgtacaactgggctatttgcatgtcacagatgtggattttactgaaacatttcttcaagggtctcaggccctgaagagctcactgcttatctggtgaaacatctgaacctgaaatgggatttgctgttaggctttgtagacaaagtgaaattaacaacatctgcacaaaacaaaccaaagccccctttctctgtttcctaggcagcgggaactactccacatcctcctggcatatgaggagtataacccggtgagtattcccggcagtgaggttcccgggccatatttccatattgacaggagtgggtgtctggtgggggtgtcgttgcttcttttaaagttagtatttgtgacccaccaggatataggaggtaggatgtcagctcaccgctggcataaacctccaaggaagggggtggtctcaaggggtcaagctgagacacaaaggagtcagggcctggactcctggtgtcacctgggcctgaccaccacttctcagaacaagaaatgacgccctcctcctggggctgccccaaagcccaggagcttggcagcatcgcacacaggatggtgctatcagcagacattttggacaaggtgctgaagtgcctgatggacttggctcttgtcatgaaatgaatgtgcatcctgaggaagcctctttttcagaggaagtctctccttcagaggaagcctctccagtcacctctgccctctccaatgacatgagtcctcccaggtgacctcagccctcccaggtgatgtccttccatggtgactctggctcttgcaggaggtgggctactgcagggacctgagccacatcgccgccttgttcctcctctatcttcctgaggaggatgcattctgggcactggtgcagctgctggccagtgagaggcactccctgcagggtaagtgaacagctgccccggggacctcctgcagccagacctggggatggccaccctggccaggtgatcacagctttcagccaaggcaccctccttgtgtcgccagcttgttgggagactttagaatgtctctgctgagggtcccacaggagtccacggctgacccccaaagcccaaatcagacgcctctcatccccatcagcagagggcatctcatcctccccgtggccaccctctgtgtcctggagccacgccctccggctctgattctgtgcagctgactctcccctccctgagagtcctcctgccctccagctgcccgggctcctgctgccatcggtgcccacgaatgggccgaccaagcccaggtggcagcatctccccatcccctgttccctggcccgaccccactaccaggagatgaccgggaagcccagcgcccacccagttccggccaccctgtcgtggcctgaaagtcaggcttgccctttttgcaccctggcccaggaggcctccaggggaacctccagccaggctccagggaatgttcccgccccacctccccagggtaaaggccgcatgttggggtcaccagacgggagggtgggaggccttggggtttgggggcctctccagctgcccagctcttgcagctgatggctccacatcttgggggaaggctctgatttcatgatgggctgggggcttctcaggatttcacagcccaaatggcgggaccgtccaggggctccaagaccaacaggagcatgtggtagccacgtcacaacccaagaccatggggcatcaggtgagtttatggtcccctcagctcttcccagaggccctgcctcccgtggggctgtaggagcaggggggctggagcccctcgtggggctggtgactggctgagtcccagccagggcctgacctgggacgtcgggttctccatgggctgggagttggtttcctttcctgccctggaggagacagaggcacagggatgggggcccagctcccgcagagcagggcaaagggcagtgtgtccaccgggagtgtgggaaggtgacagtgttgtggggagctctggacaccgcccagtgttctgcactaggggaagggtcttcagaggccctggaagagggaggtttttagggcagcccagtggcctgagcacctctgttgcttccatcaggacaagaaagatctatgtgggcagtgttccccgttaggctgcctcatccggatattgattgacggggtaaggaggcatagggagaccctggctcagggaccttccttgccctgcagtgccctgcttccccagcccgggggtctggctcactcccagcccacaggaggctcaggcgggtccccaaaggacacacaagcaaaaccctctgcccaaggggggtcatcccagggccatggctggggctcaggcccagcctcatgggcagactgggccaggacccgacttgagagggctcagggaggcctcaagccctgggcaagcccctctctccaggagccacatccccactcaaatgagtgccccccatgaggagcttcaagaccttgtctgacccagcgtcctggagggctcaggcgaccctcatggggaaggtcactgactctggagactgaagccccagtgtgcgcagctcgagccaccagccccagcctggaaggaccaggttctttcacacctgctgtccccacagatctctctcgggctcaccctgcgcctgtgggacgtgtatctggtagaaggcgaacaggcgttgatgccgataacaagaatcgcctttaaggttcagcagagtaagtctacgtgtgcccagcggggcctggggagccctggggtcagaccccgactggcccgagggcagcttcctcacactgtcctcatgatcctctgttctggcccagagggaggtctggccaggtgggctgggcaggacactgtgacaccgagcccatcccccacatgacccagatgaaagtcgagagtgtggtgagcacttccctgtccggatcgccccccagccacagtctcctgtgtgtatctggacacctggggtggccacaaaaggatccggcactgcccagtaggagactgaagtggccacggggtatgagctgtgaccattcccaggtaactcccctggcctgatatccaccctgtccctagagcgcctcacgaagacgtccaggtgtggcccgtgggcacgtttttgcaaccggttcgttgatacctgggccagggatgaggacactgtgctcaagcatcttagggcctctatgaagaaactaacaagaaagaagggggacctgccacccccaggtgggctccagtgccatgtcccctcccatgtcaccctctggggtagtcagtagtaggggagtgcccgggacccgcaaccctactacctgggccttcctcttcaccttttcttcctcctcttcctcctggactctaagaaagtacaggaggcccaccggtcctcagggcaggcgctcagtgcgtgtatactggacatgctgtgcacgcaggagggggatgtgggcaagaccctccaacaagccccctcccactttccacggtgtctccctctccccctcgcagggccctccaagttactagacgagcccagacccatttgtgggagaccccgcccctccctgcaagcacccacagcctcagagagcagcagaggcccctcactcctgcacgctcctccaaggttgccaggacaagaagcctggagccagggagacaagggaatccgtgtccctgacccacagagcattcagggagagggcacaggcgggaccccgggcccagagccagagccaagagttcagccagaagtgggaacggtcagtcctggcatggactgggcagcccaggagggcagagggtgacccacgtccgggcccaatcacccactgcggagacgggtccccacgtgaggtgacaaggggctgggtgacatccaaggcccctcccacctgagttctgactgggggccgtatcccaggcccaacagccctgggacgaaggtgtgtggcaggaagcccccagccagtctgaaccctgggggcagtcccaggagccacccgccatgccacgacagcttccccacgccaggcagcatgcacccctccctctgggatcagcagactacaggcgtgtcctcggtgtcaggccacgggggccacacagagaccccgaggactccagagacgcaggcaggtggggcccagcccggaaaggcctgcgtgggctcactggagatgctgaccgcgtctgttttcctttcagccaaacccgagcaagggtcgtcggcatccaggcctgtgccggcttcacgtggcgggaagaccctctgcaagggggacaggcaggcccctccaggcccaccagcccggttcccgcggcccatttggtcagcttccccgccacgggcacctcgttcttccacaccctgtcctggtggggctgtccgggaagacacctaccctgtgggcactcagggtgtgcccagcccggccctggctcagggaggacctcagggttcctggagattcctgcagtggaactccatgccccgcctcccaacggacctggacgtagagggcccttggttccgccattatgatttcaggcagagctgctgggtccgtgccatatcccaggaggaccagctggccccctgctggcaggctgaacaccctgcggagcgggtgagatcggctttcgctgcacccagcactgattccgaccagggcacccccttcagagctagggacgaacagcagtgtgctcccacctcagggccttgcctctgcggcctccacttggaaagttctcagttccctccaggcttctagaagcatctgggccagggctcatggctggataatttccctaggcttaacaacccaagcaagcttcgcatcctcgttttatttttggttaaacttatgaaaatgtattaagaaagagtgcagctcgagagagattcagagatggaacacaccagaccccagatcacaaagccaaccatgcccagcccctcccagcacccccagccccacgaccatcgttctgaattctgacgacaccgtgagcctgcctttgtacttcaaactcatggaaggataaccaccttcatgttttgaaataaatgtttcctgttgaaatgattttagattttagacagaaatattgaaaaggcactatagtatcctcctataccttccatccagctgcccctaataatgatgttttgcagtcccatggcacataagaaatttaggccgggtgtggtggctcacacctgtaatcccagcaatttgagaggtcgaggcgggaggttcaggttcacttgagtctagaagtctgagaccagcctgggaaacctaggtggacccggtctctagagaaaagtcaaagaaattagccaggcatggtggcgtgtgcctatagtcccacctagtcaggaggctgaggcaggaggattgctggagcccacgagttccaggaagcagtgagccatgattgcaccactgcactccagcctgggtgacagagtgagactttatctcttaaaaaaatttaagaaatttaatgtgggtacagttctattaactaaataataatgtgaactattatctaaggttatgaaggctagaattatcccatttttgcctaacttctcgtacctgtcccaagatcccaccttggactcaccctctgccttcagctcacgtctcttcagcttcctccacatggtccagcaaacacacacctgggctgaatggtagagctgattgctcatacacaaaggtagaccggtgggcagggattttcagacttacacagtcaatgagttttccttggtgttctggagagcaccgtttgagaaacactttgacagtgaatctaggcctcaagatccatcagctgctctagcttgaattttgctcaagctcagtgaacacctgctctgccgggtgcacgtgaaaggggcaaggatgagaaagctgtagataaagaagacaggacgcagggggtctgtctaagctctatcccctgccttcagcactgagggatgaaatccaactcttagggaacggtggccacgtgctgggccagccccaggctctcaggatctgacagtgggtgacgcagagccaggccttgcccctggggagctctccagcatacacctccctctcccctcccagcgtgccgcaaagcaggcgtcaacgccattgttaatgcacggaggaggaagctgactgttagacctgggttttccagggttgcacggcttctgggagacggatgtgaccctgaggacagggcacaggccagtgtaatgccaggatggaatgagctgtgatctgtgctgtatagaggcctaggccaaggtgggactgacggatgaccaggtcagccgggtcactgaaaacactcttgggtcctcacctgccggttcccaggagtccggaactgccaggagagtggtggcaggtcccccatcctcagctgggtgggcctggatagaacagcaaggcgagggcacatttccctggccattccctccaggcacagccgtgacctgttcattccaaatttgtggaagtatttccacacacacagaactgcaaatagcagtggacatggtgagaggcgtttgcacatgggataggcaggattttggaggcagagcctccagggcttgccgatgggttagctgcagggcttgagagggaacggagaatccaggatgatgtgttcaaatcggtccattcacctcttccgttccacgcctgtgctgggcactgggagagacagatgcacacaggagccccggccgaggggaggtgtcgggggaagcccagagtgtctgggcagggtaggaaacccagagcgtctactgggagctgaaggcttaggtccacctgggtgccgtccaggttctctgcatgtagaagtataggctgagcttcccggaggaggagcagctgctgttgctggtgaccagcacattcaggaacggagactactctgtcaacagacagggggatgacctgaggtctggatggtctagggggtggtagggcccaggaggacccaggaaagggtctcggggatgcagaacatcctatggagggcatttgggagtcagtgctcaggccactccgggtcacgcaggtcatttgccggcctctgtcataattattgccatatgagagtgccacctttcctgtgacataatttagacattcctgtgaatggcctacctgtttatatttacaacttcatgtttaaaggaaatttgtatcactctcataaatggaaagccagcaaaacataaattcaatgaaaacaaaatgaagtcaatgaactttagctagatactattccctgaccaaggcctgctggaggccgtacaaccggggtttgaattgagatctgccaagcttctgagtttattctgtttcccccacaccaaggatcctcaatactgcattactgacatcaggggccagacaattctttgcgatgggggctgtcctgcacctggcaggatgtttagcagcttctctggcctccacccactggatgccaggggaatgcagaagaggcttgcttattctcccatttaatgctcaggacaatatctgacatcaatgttacgtcttttattttataaatgaagacaatgagactcagaaaggtttaagtgagtcacctaagaacacacagacagcaagaggtagaacccgaaactgaacacaggtgtccacaagacaacaaaaaagttcaggttccagcttcctttgagtctctcatttcaacaatggccatcatctgcatacgagctgaagtacaggaaagctgggctgaactctcttcccatcaggcctaggagccccagaccagaaccccagcccaagttctcccagtcaggcccgctggagggagctggcatctacactagcatggtttctcaaagctacagggatgccagtctcgctgctgatgaagaaaatgaagggcatttgcttctcctgcaggctgtcgggatttaacacagattccttttcttgctctcttctcccatagcacaaaactgggtggtccatccccctcccagtgtcccaaggctttgttgcgtgttctctttaatttctcccactctcgcagtgcaccctaccctcgtctccctggcaacctttctgctctatcctctcgccacctggatcacaagaacacttgtgagaccccttaacaagctacatcccaaattatcattcccctttgtcctcagccagtgcccgggtccaactcgctctcctggggtgactttctttcctgcccaatatggtttcatcatctgtaaattggggataattgaagtcttgatcctgatattgggctctgaaagcagaagtagcaagctcagccaagtcacttcaacaagaggagacgttccttgtgaaccaaaagggcactggtcacaagggccgctccttctctcaggcctctccagcacgcccttggctcagccaaagaagagactcaggctgtgcttctgtgctgtggggataacgtaggtacctggtccttgaccctgggactttaacagttccctcttgtggctcagttctacagcttcaatgacacaaagtggcttttgctcaaaatagcctttgataggttaaggtactcctctgccactctaagtctgtgtggaacagacagggttttgcttcacagagaagatgcataaaatttggtcttaaaaatgagttcaccatgcacacatacacacgaaaaaagtaaatactgcattactgtatatatgaggttccaaaataggcaaaactaatttatggtgacagaatagtggtgacctctgagggtcagtgttgactgggagagaacagaagagagcctactggggtgctggaaatgttctgtatcttaattttgcaggataattccttggatgcatccctaaaaattcagtcaagctatatagtaagatttgtgcagtttatgtaagtaataggagagataagagggggaacctgtggagaagcagaacatttcaagatctagaaagcaacagttgcaagggtacacagtgttcagacagggaccaaatcatagaaactactagggcttgccatgctgaaatgactgacttcaaaccatagggcatacgtaccttccactgaagaagagcacctgagtaaaatgactagaggtgcatttcaaagattattctatgggaaatataaagaacgaattggaggagtaggaggcaaatagtccaagggacagatacagatctttctttttcttttttttttttttttgagatagggtctccctctgtcaccctagctggagtgcatttctgcgatcatggctcactgcagcctctacttcctgcgctcatgcaatccttccatctcagcctcccaagtatctgggactccagatgtgcggaccacacctggctaatttttttattttgttgtagtaatgggaatctcactgttgtttcccaggctggtcttgaactcctgaactcaggcaatcttctggccttaacctctcaaagtgctgggattacaggtatgggctacagtgcctggccttattaaaatgttgatgtaataaatgggactacctagtgctgtgctttctccttaaaggagagagctgacagaataaaactagcagtaataatctggtaaattgtgctttctacagagtaaattttgtttgtctcatgacatttatgcaaatattcaaatgtttcaggaatataaacatttaaaatttgggttataaataatgcctcctggctctgaaattatctgaattcatgaagcaatcagtagtaaatatgaaggaaaaatgaaacacagccttatatgcaaggacaaacacaaatttctaattcttgttataatttgggtgcccacctggttttgaaggtgagccttggtctgactggttctgagacatttctctcaaatagcaaatgagtagtgggtatgaatagggtacattggaaagtcatgtcaaaattccatgtaatttttggagcgttttttctcccatatgatttatataatttgacatgtgtattcctatgtaaaatatttaaccacttctctacaataagcattaagtgggctcattagtatgctcttcttattccatatttctgtgatttctcttatctggaacgacttttttatgccacccaggctggagtgcagtggcacatttactgctcactgcagcctcaactccccagggtcaagccatcctcctatttcagcttccctagcagctaggactacaggtgtgcaccactatgccctgctaatttttgtgtttttttgtagagacggggttttgctatgttgccccggctggtcttgaactcctgagctcaagagatccacccaccgcaacctcccaaagtgttgggattacaggcgtgagccactgcactcagcttcttttctaatttgtttttattctgagatcagatgagatcagcatgttcaggttggtatggccatagactgcttttatctattctaataattttgtattgtacaatgtgttggaaaggcaagatgaagttagattatgaagggttcatttccattcaattctgtctatccttctggactttgcctaaatcttaccttctttggagctttcctgaactaacttatctcctttgaattcttacatttggatcctttgtatttgagtatttttacatatatatgtacataaataacacgttttatgtgtagtaatttactctcccaactagattgaaagctgcttgaagagtaacctttttttaaagtcacattggaccgttttaagtacaaatttagcatatgcttgatgattgagagaagaaccatatggttacagtcattggtgtgtctatgattgtgatatgttgctatttaaaaatcaatagttatttcttatttagttttctgttaagccataaccttttgctctcatttatacgtcttctgaacgttaagtaacatgtggctcatatttcaaactcccaatttggaagtttatagcaatgtaactgaagtttataattacaggtctcagaaaactgcactacacagaagttctctatgtgttagaagaatttattagaagatagacaattgtaggttacactgtaatttagaagacttttgcgcatctcatgtatttgtgtcagtttgagaatttgaaaatgcccccaaaatgtctgttcttcactagtgcctcttgtgatcctggcagagataagctaaacttttgaaagggtagactttttctgtttatcttagtatcctgagtccctaaatctggaatgtagtagatgtttgtgcatttccctatgtcagtgaagtcaaaatactagaggtggatttttcagcttttcaaagttttcacatttactaagtccttcacagttatcgcctactagttaaaaaactatttgcctcaatttaggccagtgctactttgacatttgcattgctgtaaaacccttactaaaaggtatatttttctggtatataaatacatgtatgcagcttttctcatatctttgagaaagcaaaaaattgtactaaattatgatttccactgtaataggattatggcttagtcatgatcagtattatgttttcagctatgtcttactaggattattgtaaaagactttcaaaatagttcatgtgaatctttgtctgatcttcacaaactcgggtatgtacatagctctcccccaccttctcctggctttggcaatttattttatttttattgtggttatatatatatatatacataaaacataccatttaccatttgaactattttaaaaagtgtacaattagtggcatgaagtacattcacaatattgtataaccatcaccactgtccatttccagaacttgttcatcatcccaaacagaaattctctatcccttttcttccccagcccctggtaacctctattctactttctctttttatgaatttgcctattctagacacttcatggaaatagaatcaaacaatatttgacctttcttatttcacttaggataatgttttcaaggtttatccatgttgtagtacatagcagaatttaatttctttttttgactgaataatttgtatatactacatcttgtttatacatccatctgttgatgggacatatttgggttgtttccaccttttggctattgtgaataatgttgctgtgaacactggtgtgcaaatatctatctgagtcctgctttcacttcttttggatataaacctaggaatggaattgctgggtcatatggtaattctatatttaaccttttaaggaacagctaacctggtttccacggcttctgtaccattttatatttctaccagcaatgcacaagtgctccttccattttctccatatctacccaatacttgttattttctgttttctttcaattaataaccatcctaatgggtgtgacatagtattgtcattttgatttttagcttcctaatggctagtgctaatgagcatttttttatgtgctattggtcatttgtatgtcttttttggagaaatgtctgttcaatcctttgcccatttttgaattgagatgtgcgcttttttgttgttgagttgtagttctgtagttctttatacattctggatattattctcacatcagatatatgatttacaaatattttctcccaaatacttctgtgggttacagatatattaatatctgtagattgtctttcatggtcttgataggatcttttaatgcccaaaagtttttaattttgatgaaataatgtatgtagctttgaacttaaacaatgttacagattgcgcaaaggatataaccatgaaattctgatggagtgaccccacagctgcagaaaaccagaaagaaccctactctaaaacccaaaagacttccctagatagagtccttcgaaaataattttctaaattattcacacagcctgtggataaattaagaggaaatgatatctgtaacagtgctgcttgtgatgaaaacacagaagagtcaattatattatcaaatcttagctggaatggaaaatcaggaggatatttattagcaaacattaataaaaggttggcctttattattgtaagcatgtacacagacgacagcatgtagtctctaccataagaatgagaaatgcctcctatctttatgcattctgaaatttaacctttcttaacccaattgctgtaagggcctagggtttatttgttatgtgtgttattggagtagagactgtttgaaggttaagggggtatttagtgatgcaagtgacatttatatgttttaaaatcttctgcttttctaggcactttttaaaatgaaatgctatatttttaaacttttaaaaattatttttattattttttgcagagatgaggtcttgctgtgttgcccaagctgttctcaaactcttggcctcaagagatcctcctgccttggcctcccaaagtgctgggattacaggcgtgaaccacgtgcctggcccaaactttttaaagactttatttctggaggcaggttctcaaaagatatcctatcttaatgggcatatatagagagagagtagtaggtgagtttaagggggatgtaaatattggccgaaagaggtttcttttaggtatataacccctcaaatgtagccctttggatatcaaaagtttattatggcaatgttctttgtgcatttttattcgatgttgtcagccattcatctaataactcttcagaagattttgtctctgggcagtggcattttataacttcctatatggaagaaaacttttatccaactgataactgatatgccaatgtgttagtatgaaaaaattttcccaacattcttaccaggtgtggtggctcaacctgtaatcccagcactttgggaggtggagtcgggcggatcacttgaagtcaggagttcgagaccagcctggccaacatggtgaaaccctgtctactaaaaatacaaaaattagctgggcgtgatggcaggcacctgtaatcccagctacctgggaggctaaggcaggagaattgcttgaatctgggaggtggaggttgcaatgagccaagatttcctcactgcactctagcctgagcgacagagtgagactctgtctcaaaaaaaaaagaaaaggaaaaaaaaagaaaatttcccaaaattcaaatgtcgtttcactgcgtggctttgtttgattattaatactttaatactgtgtttaaaattaatatttattatttttaaaaatcagcttccttaggtcgaagaaacattaatgtttaatattaagctattattgtagcttagtgtagttataataagatactggaactcatggaaggggttagattttcttcatcttagaaaccgttacttttcataaaatatatattgtgcaattatatataaaattatataataattagatatacaaataaaaaatcggattatagttgggctcagtggctcgcatttgtaatctcagctccttgggaagcttagactggaggatttcttgagtccagaaatttgaggctgcagtgagccatgattgtgccactgcattccagcctgggcgacaggaatgagaccccgtctctaaaaataaaaactaaaaaaaaatagattatgattggcaaaagattgagtgacagtgaaaatgcaatgaatattttgactactattttttgattacatacataggaagatacgaatttttctgtctttccaaattagtttagaaactaaagatttggccgggcatagtggctcacccctgtaatctgagcactttgggaggctgagataggcagatcacctgaggtcaagagtttgagaccaccctggccaacatggtgaaacctcgtctctactaaaaatacaataaaaattagctgggcatggtggcatgcacctgtagtcccagctacttggggagactgaggcaggagaatcacttgaacccaggaggcggaggttgcagtgagccaagatcgtgccactgcactccagcctgggcgacagagcgagactctgtctcaaaaacaaacaaacaacaacaaaacaccagaaaaaggaaaaatagtgttaagagataacttagtatgtactgtttgtacacttcatgggtgtgcatatatgacgtgtttggttttatagtgaaaattctaacattctgctgtatggtttatggtgcattgtagacgttcctttaagcactcaatgataaagattaaaattactaagatagagagtaaatctatgttatatgtagtcatttctcagtttgcatagtagtatgggactgtaaagatgaccatgcaagctaagactattcaaagggatcatagtaatcagtggaaaaaattgtgattgttctgttggacctttaaaaatttttgtcaaaacattaaaaactctctcacagttggttatagatatacagggtaagaagaagcgtggtatccacagagaaggagggagcttcataaacaaagacaaacaggaatatcaactaccagccaccaacagcactcttgtaaaacttatttaaatattacaaaaaacaatatacaagattactaagagattggaagataaagggagaaaatttcactaatgatctcatcaccaaacacagttaattatttgctgttactcttttatcaaattagtgtttagtattgttttaatcataatgtacatacaattttgtatcttgctttttctgagatgtctgtttctgtccatgttatacatacctatacagtcctgtgctgcatgatgatgttttggttaacgatggactgcatacacaactgtgatcccataagataatagtagagctgaaaaattcctattgcctagtgacattgtagccatttacttgtttttgctttctgctttttttatgtagtcatttactatactaaacctttaatcattattttagagtatactcctatttatttagaaaggtcccccaagggaggacagaaaacactcataatttaatgttattgtccttttcacacatatgtagctatatctattatattttattttactttattttattttaatttttgagacagagtttcactctgtcacccaggctggagtgcaatggtgcagtctcagctcactgtgacctccacctcccaggttcaagcaattcttctgcctcagcctcccgagtagctgggattacagatgtgcaccaccatgcctagctaatttttgtatttttagtacagacgaggtttcaccatgttggccaggctggtcttgaactcctgacctcaggtgatccacctgccccagcctcccaaagtgccgggattacagcacttttacagcatgagctgccatgcccagcctattttattttattttgttttattttattagagacagtcttgctctgtccccaagcctggagtgcagtggcgtgatcgtagctcacttggctaatttttaaactttttgtagatatggggtctgggtatgttgcccagcctgatcttgaactcctaggcttaagtgatcctcctgccctgacctcccaaagtgctgggattacaggcgtgagccatcctgcccagcctgtatctattatataagctggtttttttgattactttaatgtaaatgagattataccatactctcttctctgtcacttcctattttcatgtaatttatgttagacatctgtcaatgtcagtataaataggtctagatcattttttatagttgtatacctttcgttacatggatgtttcacaatttacttagctaactacctattgttggacatttggttatttccaaatttttgctgttttatataatgctgcgcttatataaaatatagttctatataattatgtttaattatgtactaccgctgtatctgacaactgacttgtatcaagaacatacaaagaactgttacaagttgccaggcagagtggctcatgtctgcaatcccagggctttgggaggccaaggtgggcggatctcttgagcccaggagttggagaccagcctgggcaacatggggagaccccgtctcgacaaaaatacaaaaattagccaggcataggggcacacatctgtagttccagctacttagaggctgaggtgggaagactgcttgagcccaggaagttgaggctgcagtgagccaagatgacaccacggcactccagccagcgcgtcaaaggccctgtctcaaaaaaaaggaagaagcgggggcggcaaataagtagagtataagccacctcatccaactttattggaaccagtagttgactggttaatcagtccaagcaaggaagcataaaaactgatgcatgtgccgggcatggtggctcacgcccgcaatccccgcactttgtgagaccgaggcgggccgatcacctgaggttaggagttcgagaccagcctggccaacatggtgaaaccctgtctctactaaaaatacaaaagttagccatgcatggtagtacacgtctgtaatcccagctactcaggaggctgaggcaaaaaaaggagaagaaatgctatgtgaagcctttttataagcacattaatttcattcaggagggcagagcactcatgacctaatcaccaccttgaaagcctcacttcttaacatcatcacattaggtcttaggttataacatgaattttggaggactccagaaaaaaaaagtgaaagacaacccacagaatgggagaaaatacttgcaaattatgtacaaagtaggctcactttatttgtggaaaatatgtagccagacacagtggctcatgcctgtaatcccagaactttggaaagctgaggtgggaggatcacttgagcccaggagctcaagactaacctgggcaacatagggataccctatctctacaataaataaataaaattacccagatgtggtgacatgtgcctgtggtcccagctacttgggaggttgaggtgggagaatcacgtgaccccaggaggttgaggctgcagtgagccaagataacattaatgtatcccagcctgggcgatagaccgagaccttatctcaaaaaaaaaaaatatatatatatatatatgtatatatttatctatctacctatatattcatatatagatatagattaatatagatatataaacatatatttatagatatatagatacataaatatatagctatatataaatatatatttataaatatatagatatatatgtaacaaaatatgttccaagacctccagtgtatacctgaaactgcagatagtaccaaactctatatgtactatgtttttttcctatacatacatacatacctatgatgaagtttaatttataaattaggcactgtaatagaataacaacaataactaataataaaagagaacaattagaatatactttttgtttttgagatggagtcttgctctgtcacccaggctggagtgccatggcgccatctcggctcactgcaacttccacctcccaggttcaagcgattctcctgcctcagcctcccgagtagctgggcctacaggcacctgccaccacgcccggctaatttttgtatctttagtagaggcagggtttcaccatattggccaggctggtctccaattcctgaccttgtgatccacccacctcggcctcccaaagtgctgggattacaggtgtgagccactgtgcctggctagaatatactttaacataagttacatgaatagttttctctgtctcaaaatactgtaatatttgggattgcagctgcccgcaggtaactgaaactgcagagagcatacgggagactacagtatctgacaatggacttggatctagaatacataaagaactcttacaacttgataataaaaaggatataacccaattttaaaatggacaaaagatctgaacagatatttctccaaagaagacatacaaatggccaataagggccaggtggtggcttatgcctataatcccaacactttgggaggccaaggcaggtggatcacttgaggccagaagttcaagaccagtctggccaacatggcgaaaacccatctctactaaaaatataaaaatcagccaggcgttgtggcgcatgcctgtagtcccaggtactcaggcagatgaggcacaagaatcactcgaacccgggaggcagaggttgcaatgagctaagattgcaccactgcactccagcctgggcaacagagcaaaaccccacctaaaaataaataaataaataaaaataaaagaaagaaaataaatggccaataagcacaagaaaatacactcaatttctgtcttagtctgtttgtgctgctgtaacaaaatacctgagactaagtaatttataagtaaaaaaatttattcctcacagttccggaggctgggaaatccaaaatcaaggtgatagcacatttggcatttggtgagggcctgttccattgttcccgttctcgcagtggcatcttcacatggcaggagaagaaaggaaaaaagaagaagaaatgttatgtgaagcctttttataagggcattaatttcattcatgagggcagagccctcatgacctaatcaccaccttgaaggcctcacttcttaacatcgtcacattaggtcttaggttataacatgaattttggaggactccaacattcaaaccatagaaacatcattagccatcagggaagtgcaaatccaaaccatgttaagataccacttcacactcacaagaatggctataataaacagacacataataacaagtgttggagaaaatgtggaaaaattgaaacactcatatgttgctggagggaatgtaaaatgctttgcaatgaagttggaactgctttggaaatagtctggcagttcctccaaagcttaaacatagagttatcatatgacctggcaatgccaggcttcatcatattcccaagggaaaggaaaacatatgtccacacaaaaacttacacatgaatgttcatagcagcattattcataatagtcaaaaagtggagacagctgggtgtggtggctcccaacactttgggaggccaaggcgggaggattgcttgaggtcaggagttcgagaccagcctggccaacagagtgaaatccgatctctactgaaaatacaaaaatcagcgggacatggtatacgtgcctgtaatcccagctacttgggaggctgaggcaggtgaatggcttgaatccaggaggcggaggccgcagtgagccaagatcacaccaccgtactccagcctgagtgacagactgagactccatctcaaaaaaaaaaaaaaaaaaagtgataaacagataaatgaaatgtgttatattcctacaacagaatattattgagccataaaaaaaaaggaaataagtactgacacatgctataacatgaatgaaccttgaaaacattaggttacttgaaaaaagccagtcacaaaagatcacaaattgtatggttccatttatatgaaatgtccaaataggcaaatcctatcctaaaagaaagtaaattagtggttgcctaggactgagggatggagaaaatggggagtgactgctcataggtatggtatttttttttgagagaaatgaaaatattctaaaattgattgtggtggccaggcacaggggctcacgcctgtaatcccagcactttgagaggccgaggcgggcggatcacctgaggtcgggagttcgagactagcctgaccaacatggagaaaccccgtctctactaaaaatacaaaattagccgggcatggtggtgcatacctgtaatcccagctactcgggaggctgaggcaggagaatcgcttgaaccagggaggtggaggttgcagtgagctgagatcgtgccactgcactccagtctggcgagagagtgaggctccatctcataaaaaaaaaaaaaaaaaagaaagaaagaaaaaagaaaaaaaagaatgtttcaggcaaagggaagagaagtgcaatggtgctatttcaggcagaagcttgtcaggtttgctgtggtgtggtagtgtggaaggactcagtgggaaggaaaagaaatgagggcacagtagtgggcagggccaagataaagccatacgcatactgctacattttttccttgtccaatatatttcattaaatgtagacaaaacttattataaagacataacttttgatgtttgtaaggtcatctgttatttgcactcctttttttttttgagatagggtctcactctgtcacccaggctggagtgcagtgttgccaccacagctcacagcagcctcgacctcctgagctcaagcactcctcccaccttagcctcctgagtatctgggactacaggcacatgccaccgtgccccactaattttttattttttgtaaagacagggtttctccatgttacccaggctggtctcaaactcttgagctcaaacaatctacccaccttggtctcccaaagagctaagattacaggcgtgagccactgtgcctggcttgttatttacatttgtgattttaaaattccatgttttttatcataagattgtcaggtgctttctggacaggaaatgccttaatttatgactcaaaatacaaacaagtgtaggtgatcaaatgcatatctatgtcttcaatggaaatatatatacatacaagtcattaacgaagacaaatgagaacatgaaattcatgacctattttcctttccatcacctagccccctaaaggagagatctttttcattcagagccctgggttttgttttgtttcatgatttgcttttttttttttaaaaaaataagagtttatttatttatttatttgagacaaggtttcactcccatcagccaggctggagtgcaatggcgtgatctcagttcactgcaacttctgcctcctggactcaagtgactctcttgcctcagcctcctgagtagctgggactacaggcacgtgccgctgcatccagctaattttttgtagagacagggtttcaccgtgttggccaggctggtcttgaactcctgagttcaagcgatccgtctgcctctgagtctcaaagtgctagggttacaggaatgagccgccgcgtggccaaaagagtttattttttaaagaaaattgacttctttgaaaacgtagaaatgaggccgggcgcagtggctcacacctgtaattccagcactttgtgaggccgaggcaggtagatcgcttgaactgaagagtttgagaccaatctggccaacatggtgaaaccccatctctactaaaaatacaaacattagccgggtgtggtggcaggtgcctgtaatcccagctactcgggaggctgaggcaggagaatcgcttgaacccgggaggcggaggttgcagtgagccaagattgcgccattgcactccagcctgggcaacaagagcaaaactccatctcaaaaagaaaagaaaaagtagaaatgaggaagcggccagcctgtgtggggatctaatcaaacaaatcttcccctgatgagggtagcacttaagttgaaaaaaatttgcctatataataaatattgcaatactttatttatttatttatttatttttcgagatgagggtctcgctgtgttgcccaggctagtcttgaactcttgggctcaagggcttctcctgcctcagcctccccagtggctgggctaataggcacacaccaccatgcccagctctacatactgattttttttttttgagatggagtcttcgctctgtcgcccaggctggagtgcagtggcgcgatctccgctcactgcaagctccgcctcccgcgttcacgccattctcctgcctcagcctcccgagtagctgggactacaggcgcctgccactgcgcccactaattttttgtatttttagtagagacggggtttcaccgtgttaaccaggatggtctcgctctgctgacctcgtgatccgcccgcctcgacctcccaaggtgctgggattacaggcgtgagccaccgcgcccggcccatactgattttgaaatttaaaaaatctacattctatattcgcatcatagcttctccctaataaaatctttgtgagtgtttatgggacttattccccgaaaaatctgcaagcagcctggtagctttatatacacaggaaagccaaaggacaaactaggaattacgtcagagatggggaaagactaaggatcttacccaaatcagttgagaatcagccttaagtataaatgggccaggtgttggtggctcacacctgtaatcctagcactttgggaggccaaggcgggcagatcacttgaggtcaggagttcgagaccaccctggccaacatggtgaaaccccgtctctactaaaagtaccaaaattagccaggcgtggtggcacgtgcctgtggtcccagctacttgggaggctgaggcaggagaatcgcttgaacctgggaggcagaggttgcagtgagctgagatcacgccactgcactccagcctgggtgacagagtaagactccgtctcaaaaaaaaaaaaaaaaggataaatgaagcacaattaacatttgttaattttataaagcaaaagttcataaaaataaatattctaattaactctcctacatcttataaacactattaccaaacccatttaagattgaagataaattatatcatggcatgggtaaagattttcaataaggagttgctaggataaaagtcaaaattctccagcataaattcactgacagggatttctgtttaatcttttcaaaattctaatacccaatttgtttcctctagagaataactcgtgtagaatcataacctctttggtggaccttgatttttccatctgtaaaagtatagaactagttttgacttaacagtcaacaaatgcctaccctctccacatctagctgattagagcgccctcatgtgcgcatttgctgtaatgttttagaaatctgaaaaagacaatattaatctcagcagtaatacaataaataatgtcttcatttgcacatttatagcaaatgctataaatatatagctccaagtattactcagtaaaagctaaaggcaaatgctgtagtaggttaatcttactgtcgttcactatcaaacctttcatatgccaattttatcctaaaacagtgaagttattgttttggtttcaattttaatttaatgacttaaaggattttttcccttaaaacttctaagtatttcattataatattatttcatcattaggcttaaaggaaaatatgtggtcaattgagttgttatttattatacatgatagcttgacatcatctttttagggatggaaaacagctccagggaccaagtctaactcagttttttgatataagaatttacctgtcggccgggcgcaatggctcacacctgtaatcccagcactttgggaggccgaggcgggcggatataggtcagcagatcaagaccaggagttcaagaccagcctggccaagatggtgaaaccccatctgtactaaaactacaaaaattagccaggcgtgatggcaggcacctgtaatcccacctacttgggaggctgaggcaggagaatcacttgaacccggttcaagtgagccggctgcagtgagccaagatcacgccactgcactccagcctgggcaataagagcaagactccatctcaaaaaaaaaaaaaaaaaaagaatttactagtttgaatcataacaatttcttcctactcaaagagactacattggaggaagccaaaacagaagcttatttatttatttatatactttatttatttatttttgagacagagtcttgctctgtcacccaggctggagtacagtggtgtgatcttggctcactgcaacatctgcctcccgggttcaagcgattctcctgcctcagcctccctagtagctgggattacaggtgtgtgccaccacggccagctaatttttgtatttttagtagagacgggttttcaccatgttggccaggctggtctcaaactcctgacctcaggtgatccacctgcctcagcctcccaaagtgctgggattacaggcatgagccaccaagcccagcttagagaagcttattttttaaaagaaaatacacaaaaaaatcaaaatctcataagtccaattgtaatttttttttggcttttaaaaattgttaatgccctcaaatattctcctatccaatcactgtattttaaatggcattcctccagcaaatatttgttgagcccccactatgtgccaggattgaaatgtcaaattgaaggaggcaatagctactgaagtaaagcaaaaaaaagtactggttatttttccttctataaaatgacctagtaataaccgctttacccaggagagttgctgtaaagatctaataacatgacacatataaccacacccctaaagaatgaggtgttactgcatgttctcactcataggtgggaattgaacaatgagaacacatggacacaggaaggggaacatcacactctggggactgttgcggggtgtggggaggggggagggatagcattaggagatatacctaatgctaaatgacgagttaatgggtgcagcacaccagcatggcacatgtatacatatgtaactaacctgcacattgtgcacatgtaccctacaacttaaagtgtaataataataaaataataaaataaaaaaaagaaattttgcttaaataaatattataataaaaaaaacaaatgaggtgttattaaaatgtttgcaagagaaaccctagtaattccaagcacatattttaggaatggtttcttgtgtagaaaatcctggaatgtgaggctctgctgatttttttaatgcatattctcttcttatgtatgcggaattttttttttttttgagatagagccttgctctgttgcccaggctggaatgcactggcacgatcttggctcactgcaactgccacctcctggtttcaagtgattctcctgcctcagcctcccgagtagatggaattacaggcgtgtgccaccgcacttggctaatatttgtatttttagtagagatggggtttcaccatattggccaggctgttctagaactcctgaccttgtgatccacccacttcagcctcccaaagtgctgggattacaggcatgagccactgcacctggcctatttttgtttttactaatgtttcaagagacccgctttatgtacagaattctggctacaacctaacaaatgagttgctctgttcatcagttatagccaatttaagtaattatgaaaagctcaacaatacttttaactggcaatgaaagcgtcaatagctcacatttaccaccacaacttaggatttcttggtagctaaataaaatgcttctattttgtggggggaaactgtcacataagttgaaattctgcaatgttcaattgatgaaaaggtctctatgttaaatcaaaggtataaattccacatcagtagtacatgaaagagaaaaaaaaagccaaaattaaagtgattcatgcccacttccctgagtgaacctaagattttactaacagagatgccgtaactttgatcatgcacacatcaaacttgaatttaaaaacatgcatgcactcactcatcttttatctcttatgtaattaatactgtaagattatattttgcctacgtgctctatattactaatttataggattattactattcagtgttgtttacttgaaaccatactgtactatacacaacttttgcattccatgctaactttatttttttaattattttttttttatacagagtctcactcactctattgcccaggctggagtgcagtggcacgatcttggctcctgcaacctctgcctctcgggttcaagtcattctcctacctcagcctcccaagtagttggtaccacaggtacatgccaccacacccggctaatttttgtatttttggtagagatggggtttcaccatgtgggccaggctggtctcgaactcctgacctcaaggttataggcctgagccaccatgtcccagctccatgctaactttagagcttatttcccatcccataagatacaacactacttgtgttatatagtgagcagtgtggggaagaaaagcatagaattaagttagtgacaaatccagtgaactcaaaaagagggaaaaaaccactcccaaacaattgttttccccatattctattctccctagaggtattccatacaggaacgacaaaagaaaaaaaagcatacaaaatgagaaagatgttcatgtgacatataagtacagtaataaaatcaacaagcatatatggtatttaagcaaaatagtatgtatgcattgatggtcatctgatataaatccatcatttctgttggccaacatctaaaacctttacttttctgaggagacaagctataaatctatacggatatttctacaacgagaattcactattacatatgaaccaatataatttgatgtcaaatattcacaattaggttgaaaaaatcccctacttggccgggcgcagtggctcatgcctgtaatcccagcactttgggaggccaaggcgggtggatcatgaggtcaagaaatcaagaccatcctggccaacatggtgaagccctgtctctactaaaaatacaaaaattaactgggcgtggtggcaggcgcctgtagtcccagctactcaggaggctgaggcaggagaatcacttgaacccaggaggcagaggttgcagtgagctgagatcgcgccactgcaccccagcctgacgacagagtgagactcggtctcaaaaaaaaaaaaaaaaaaatcccctacttatgttaagagtaccaaaaatagggccaggaatgatggctcatgcctataattttggcactttgggaagccgaggtgggaagatagcttgagtccaggagtaaaatagtgagactctgtctctacaaaaaaataaaaaattagctggatggggcacacacctgtagtccaggtactcacgaggctgaaatgggtggatcacttgagcctgggaggtcaaggctgtagtgaactgtgatcacaccactacaccctacacccagcctgggctacaaggtgagaccctgtctcaaaaaaaaaaaaaaaaaaaaaaggtaccaaaaatctatagctgtttcagaaataaaatacatgtagttagtgaggtttttctctcccactgctatgacttaatttttggttgagatgctaagccaaacatcattttaagtctgtggcccaaccaaaaaagggaatcatactctccaaagaattgtacattcccactctaattgctaaaataaaatgttggattatgaaaatcaattttgtaggtatcaataagttataagagcatggcttatttaaaaaaaaaagtgggccaggttacctacatgagctgcaaagcaagcaaactgaattttcttatcgaagagcccatcctcatacttaaaatttcccatgactacatggaaattctttcacttaccaaaaacacctgattggcactttcactgagagttgtgtcatctgggctgtcgacaggtgtctgacgtgtaaacttggaatcaaactgacttacatcctcttcagattgctctatacaaacaaaataatttagaaaataatgaatagtccatatgacatcaatcaaatgcactgtaagctctgggagctcttttcgcaggggttaactataataaagtattagaatagtcttagcaggcactattctaatagtggagaaatgcaagtggaagaaaaaaatgcaagtggaaagtactgagtcaaattacatcttcaaatcttaaacatgcactaaaaaagattttagtatactgttattcctattaaaaatgtgaatatattggctgggcatggtggctcaggcctgtaatccagcactttgggaggctgaggcaggcagatcatgaggtcaggagttcaagaccagcctggccaataaagcgaaaccccgtctctactaaaaatacaaaacatcagccgggcgtggtggcgggcgcctgtaatcctagctactcgggaggctgaggcaggagaattgcttgaacctgggaggcagaggttgccgcaagcagagatcgtgccactgcacaccagcccaggtgacggtgcgagagtctgtctcaatgaaaaaaaaaaaaaaaaaagaatatatcgagctcaaaacaagctggaaaaaatgtgaatatcaatttcccctctcacaaagcttcagtgtgcctagtccactggctaaatccctgtttagagataattaattcagttggctactgcaggtttgtaataaacctgaaaaactactgaagcagagttaaaacatgaataatactggtaagatgctccagttaaagtttcttcccacagctcatttcattccttcagaaatctaaaggagcaaaaataattttctattccgcatgggttataagttatatttccttgtgaaagtatagttatcacttcagttctaaccatgagatttatttatttaattccttctctctttcccaaaatatctggttaaactcttgggccaaatgtaagaagtaaataataatttagaatatctgacttaatactaaaagatgatgaccacattgaccttataattctcttagagcccagactgtgaacctgcactccctggaggaatggctgattccaagtgtggggaaaatgtacaagataagcatagaacaccagtttccttattttgctctctcgtacaacaccagacaatgtgctcatgtcaaaaggactcagaacccaacatgaagatgcacccagcattcactgcacccagcattcaacgaagggaaaaaacgagcaccaataaaaataactgctaggtgcggtggctcacgcctatcatcccaacactttgggaggcagaggcaggtggattgcttttgagctcaggatttgaagaccagcctggtgaacacggcaaaaccccgtctctaccagaaacacaaaaattagctgggcatgatggtgtacctgtggtcccagctactcaagagggtgaggtgggaggattgctggaggtcgggacgtcaagcctgcagtgggcagcgatcataccactgcactacagcttgggtgacagagttaagaccctgcctcaaaacaataaatgaataaataaaaataaaataaaaataactgcgatgaaaggaaacacaaatatgttaaaacgtgtaagttcataatatactaaaaaagaaaaaaacacacacaaagttcattggtcaattttggaagatgctagggaactaattcattattttgaaaactaggaaagaatcaaacatacatcctgccttttctgtatgaactgtaccttgggtaactaactgatcaaagagtttctctttatgaaagaattccagctaacaaagaaagaagaaataacagttagaataaaaccatttcacaaacacctgatgaaactacaaaagtaggccagagtttctcaacctcagggctactgacattttaggcctattaatactttgcgttagggggctgtgctgtgctgtgctgactcttacccctgaaggtacctatagcattccctctcccaagctgtgacaatcagtgtgtctccagacattgccaaattaccctggtagtgaaatgctgacacaggcagtgaccactaacatcactaaaaaaacacacatacgcacacacaagtacacattatgcctcctgatcaaagcatatgcgatactgagagtgtaatctgaatcagatcaaccacctaaatttaactaccagtttttggaaatttggggaacagatgaacatggtcaatgacactctggggataatatcagcaaaatcaaaatttgagaattctacaggacaaatgaccccgtttcttcagtaaatcacgaggggaatctataaacgaaaagagacctaagagacatagtaaccaaactacatacagaccttgattaaatccttacaaacaggagaaaaaaaaaaaagaatggaacaacaacaaaaaaaaaattaggtggggcaacacagggagacctcatctctagaaaaattcaaaaaattggttgtggtgatgcacccctgtggtcccagctatatgggaggatcccttgagcctgggaagatgaggctgccatgagccactatcatgccgctgcactccagcctgggcaacagagaaagaccctatctcaaaaaaaaaaaaagagaaaaaaaaaactggggaaactgtcaacttcttaggtgtgatgatgggatgacagttatgtttaaagaagatgatctaattatttttaagctgggcagtaggtgtatgacagttctcctccttacaattgtttgttgttttttaaagtgggtcacattatggggcatgaccaaaaaataatcaccatcatcatcctcctccttctccacctacagcccaaggaatggaaaaagaaactgttttctcagattctgaggtggcagaaagacaataacacactaactcatttactcataaacatattgttatggattgaatcgtgtcccttacccaccccccagaaaatttcgtatgttgaaactctaacctctagttcctcagaatgtgaccttatttggaaagggttattgcagatgtaattagtgaagatgaggtcctactggagtagagaggaaccctaatccaatatgcctggtatccttataaaaaggggaaatttgtccacagatatgcacacaggtagaacaccatgtgaacatgaaggcagagatccaggtgatgcacctacaagccaaagtatgccaaagatgaccagcaaaccaccagaagccaggggagaggcatggaacataaggtttctcacagttgtcgaagaaaccaactctaacaacgtgatctagaacttctagtctccagatctatgagataataaatttctgttgtctaagccacccagtttgtggtacttcgttgcagcaagcctagcaaactaatgcacacatattctatattttgaagaaaaaattcccagagaatcatttttaaaatggttaaattaagcaaaataaaacaaaccaaaaaaagaaaagtcccaactacctgaaatatttaattgtcttaggaaactgacttaaaaatatctaatacaggccgggcgcggtggctcacgcctgtaatcccaacactttgggaggccgaggtgggtggatcacaaggtcaggagttcaagaccagcccggccaagatgatgaaatcctgtgtctactaaaaatacaaaaatttgctgggcatggtggcaggtgtctgtaatcccagctactcaggaggcagaggcagagatttgcttgaacccaggaggtggaggctgcagtgatccgagatcacaccactgcactccagcctgggggacagatcaagactctgtctcaaaaataaaaaaataaaaataaagaggaagaacgctatggaatttgactagaattagggctaacaatatgaagcactttgggaagccaaggcaggtggatcaccatgtcggccaggagtttgagaccagcctggccaacatggtgaaacctcatctttactaaaaatacaagaattagccaggtatggtggtgagcacctgtactcccagttactccagaggctgaggcacgagaatcactggaacccgggaagcagaggttgcagtgagctgaggcagcctggtgtccaagctgtggtgagccatgatcataccactgcactcaagtctgggcaacagaggaagtccctgtctcaaaaaaaaaaaaaaaaaaaaaagggccaggtgcagtggctcacacctgcaatcccagcattttaggaggctgaggcgggcagatcatgaggtcaggagttgaagaccagcctggccaacatagtgaaaccccatccctactaaaaatacaaaaatcagccgagtgtggtggcatgtacctgtaatcccagctactcaggaggttgaggcagaagaattgctcgaacctgggaggcggaggttgcagtgagccaagaccacatcattgcactccagcctgggcaacagagtgaacctccatctcaaaaaaaaaaaaaaaaaatttaaaaagggagtatagggccagccacggtggctcacgcctgtaatcccagcactttgggaggctgaggtggctggatcacggggtcaagagatcaagaccatcctggccaacatggtgagaccccatctctactaaaaatacaaaaaattagctggacacagtggcaaatgactgtagtcccagctactctggaggctgagacaggaggatcgcctgaacctgggaggcagaagttgcagtgagctgagaccataccactgcactccggcctggtgacaaagcgagacttcgtctcaaaaaaaaaaaaaaaaaaaaagagtttaaaaaaatctttacagaagaatgacaatatagaaaaaatacagaaaaaatagaaaagtctccaatttctaatcactatagtaatatttgatttgggcaagaagcaatccagatgaaaccattaagtaaagattattatgggacagaatattcacactgtttctatcatgccatagatcacttgttaattacaaaaggaaaaagaggctgagaatggagtctcacgtctgtaatcccaacactttgggaggccaaggagggcggatcaccttaggtaaggagtttgagaccagactggccaacatggcaaaaccccatctctactataattacaaaacttaggcaggcatggtagcaggcacctgtaatcccagctacttggggggctgaggcaggagaatcgcttgaacccaggaggtggaggttgcagtcagccaagattgcaccactgcaccccagcctgggtgacagagtgagactccttctcaaaaaaaaaaaaaaaaaatgcccttattcttaggagatgtatagaagaaattaggggtgaagtgctatgaaatctgcagttaactctcaaattgtacagaaagaaaatttattaatgttaaaaaatgtcaatattcatagatacacatatatgtgggggcaggtagaaagggagggacacagagacaaagaaaatatggcaaaatggtaacacctggtgatcactgaactattcttgcaactctgaaaagtttaaaaaatttcaaaggtatattgtttttgaactgctcgggaggtttaaatttttgaatttttaaaataagcaatcaattgtgaggaagtctgagaagccacagacttaagagataagatgaaaaataaggaaagtagaatcacagtaataagaggaacagagtttcaaaatgctgtggtcagtcagtagcttcaatgcaaaagaaagttaaattaaggaccaactcagtaaagacaactggattcagcaactgggaagtcagtgatgacctagggtacaggagctgcattgaaatagtagagttgggccacgcgtggcccacatctataatccagcagtttgggaggccgaggtaggtggacctcttgaggccaggaattcaagaccagcctagccaacatggtgaaaccccatctctactaaaaatacaaaaattaacccgagacagtggcgcacccctgtaatcccagctactcaggggcctgaggcatgagaactgcttgaacctggaaggcagaggctgcagtgagctgagatagggccactgcacttcagcctgagtgacaggggaagactctgtctaaaaaaacaaaaaataggcctggcgtggtgactcatgcctgtaatcccagcactttgggaggccgaggcaggcggatcacgaggtcaggagatcgagaccatcctggctaacacggtgaaaccctgtctctactaaaaatacaaaaaattagctgggcgtggtggcaggcgcctgtggtcccagctcctccggaggctgaggcaggagaatgacatgaacccgggaggtggaggttgcagtgagctgagattacgccactgcactccagcctgcgtgacaaagccagactccctctcaaaaaaaaaaaaaaaaaaaaaagacgtaaactgggtatgtgcctttagaggtggtgcacatttttagcattataaatgaatataaatgagtggcaattgttactttggtccacagatttttggtatcttaactagtttttggtctcttccactaaaggcattgcctgttgaaccttgttaggaatgtaagtactgaaggcaaactgcctgggtttgaattttgttctgtcccttgcaccctgcctggtttcaaatcctagctctgcttattacgttcttttaaggggatgacctttgagcaaatgtcttagcttctgttttccccagtaaatggacacaatagttgctactttgtgaaagattcatgtaattgaccagcgtttaccaagtagcatcagtgtttagtttcagtcattggtgattctgcagttggactgtgagggggtattggggtggggggtggtgtgtgtgtagcacttaattgcaggcaggaaggaaaagatacttttgataaccgacaggcagcttttctctgcttttgtgtcaaaagggaggaagggagtttggagagggaaatgaattctctgtaacactaagctctcttcctcaaaaccagaggtagatagaatgtgtaataatttacagaatttctagacttcaacgatctgattttttaaatttatttttattttttcaggttgagactgagctaaagttaatctgtggcgacgttctggatgtactggacaaacacctcattccagcagctacaactggcaagtccaaggttttctatcatgaaatgtaggttctatactaacaattaacaagtgtacttcaataaatttaaacattctcaggaatagttgactttgtttctttttttcttagacatttcatattattttccttattaaatataaccaaaaatcccacagaaattaactgaggagcctctaaatatcaacaaaattatcacttgatagactagaattaaacaagcaagtggttccaagaaatggcacgagtgtattaatcataaaataaaatttctacatgaaacattcagccattctagaccatttctgtctgtgcagactcatcttttcctgttctttgcaaagcccagctagagcaagcaagttcttcccaataggtttttcccatctctggttgcttggctggctgggcttcctctacaaacccccttcctttcccctaagcagggcccggtgtccccatcccgcggagttgacctcatgagggcatctgaccaggagtagctattcctggtgctattgtcattgtcctgtttcatgtgtgaacatggctggctctacagagatttggcgggtagcaaggaggtttctttttgaatcttcttttggaagtcagacttgatgaggatcttatgcccactttttcctagctctgtggtgtcaggcaaagtctgtttctgcaaatgggggttaagaattcctacctcacagcagtcttttgataataagatcttaagtgtaaattattccactagaaattgcacagtcactttggtcttcatcctggaggtccactgacaagcctcatgcaaacctgtggccctgttcataaagtgttttgatccatactttcaaatggcctcaggaagaccttttataaagtaaaaatgttaggcagccacatgatatccattgacccagtgaggctgttttactggatataagaggtttgacccggcattttggggggccgagacaggcagatcacttgaggccaggagctggagacctgcctggccaacatggagaaaccccatctctattaaaaataccaaaaaaattaggtgggcatggtggcacatgcctgtaatcccagctacttgggagactgaggcacaagaatcgcttgaacccgggagtcagaggttgcagtgagccaagccgagatggcgccactgcactccagcctgggcaacagagtgagactctgtctcaggggaaaaaaaagggtgaggggagggtttgaaaaaatagtagcatgtagttatgtttctacaatatttaatatatataaggatttaccaacctcttgcattagctgctatcccctacagcagttgctgtaggaaaaaaacatcaagttctgagctcctactgtttgccaggcatattctgagatgatcacgttgaaatctcagagttaccctgcagagtagtcagggtatcactgcctgacagatgaagaagctgaggcttccagcagttaaatgacttaccccaggccacatagaaaatgagtgggagagcccaggtctgtctgtgaggtataatgaaattagcataaaccctccacattggcgccacttgcataaattaacatatattctctcacagaaagtattttattgggcataacagtttgtatcatttaccgtttaacattagccgtggatcttcccacatcacatgactatgcctcattctttttggataatatgattactattgaatggatttactatcattcacttaatcaatactccttttgatggccattttaattgtctattttttccttttgcacagattggtgtaataaacctgattttatagtaatatttttgtctgcctgtgaaaatgtttgctggacaataaattcctaggagtcaaataaggtcaaagattataaatacagtatttattttcataaatattaccaagtcagccacaaatgtttaaattactaatggtttcagattattgtatttaatgagtaaacacttttatagggtttacttttatgaacacttttatttgccagatatcattctaagtcctttacaaaattaactttttaaatttgtaatataaccctgagatgtatattaggattatccccattctacagataagaacactgagaagttaattaacttgccacatatctaggaagtgacaaggctagttgcacagccaggcagtctggctcctgagtccacattttagacaacactatacctcctggttcttttgaggcattactgctggaactatcctaatactcataaataaacatttcttttggggagggccaaataaaattttaaacagaaaagttttcaccaactgtcaagctcataaagttgtacgttatacacttttttcatgatgcccacagataatttattaatgatatcatctattttaaaagacgtatgtaaaacccaacccttaagaaaggattcctatcactgttcccacaggcaccctcctcagtcttatacctttccattccaccccccaaaacaaatcattcagcatatttatttcatactgtaatagaggaagtagcttctttttagattttcttagattattaacattgatcatacaaacatggaatagaaattccttatgttttatctggatttaaggtgctacataatggaatctatttctatcaagccatacacattggagataatgaaatcacttgtgttctagcctaaacgttatgggaatttcagaactgcaacataacagataatccttggacgaaaactaaatctctcctctggtcaggcatctatgtgcatcagtgaagagaagacggggactgtggaagggaaaacagtgagtcaggaaggactgtggccacatctgttccccggaccctcaagtagttaaatcctgacctcctctaccccagactgtcctggggaacggccaacactggcttttcacaactgtgtgttaccagaaatgcaacagaaacccagctgaatccccagggtttcccttctgcccttctcaatggaaagatctgtcccaggaccatttattccaacattttcaattatgagaaatctgggaagataaagttattttcacatttctcaagaaatacatacttattcatactcattacaggaaagtcagaatctacagaaaaccaagaagatttttaaaaatccatgataccaccatcaaaagagccacacttagtatgttggtccacaggtttcctagcacccttttctgttggtgtatgcacaaaatacacaatcacattctgtctacattttacaatttgccattttttgattaacactatatattgaccaatttttaagacctgcaacatatgtcgacaacattatttcagaataatatatttataaataaacgcacacacaaactgtctgtcttatatacaacacgtcttactttctaattctccactctggaagatttaggttttcctaactttttaatatactcaccaggaatcagtaaactttttttataaaaggccaaagggtagatattttaaactctgcaggccataggtttctgttgcaacactcaactctgctgttgcagggaaagaagccatacacaatttgtaaatgaatgggcatgactgtgttctgataaactttacaaaaacaggtggtggactagatgcagcctgctcctctggacatggcttaccagcccctgacatataccactacagaggatgctgttagaatgaaatctctttacacatctctgatcatctccttaggactaattgctagacatgacatcatggtagctgtgggtcaaagggcatgcacgctctgggatgtacattgccagattgctcatgatcagcctttctcatgtcaaaatgttttgtgaccaccagaaggctggttctgcttttattatccattgactgaggagtagaaatgacatggcatgtatgcaggatatttaaccatcgtatagataatccttgtgcacaagtgcattctatattctttcccaataggtctacatctgccagagttgaaataaaataaaacaaaacaaacctatttagcaccttctgtgtagcaggtccattcatgtatgttgttgtatttcattctcagaattcttatgacctaggcattttaaacatttttttaaaaatattgagttgacaaggattgtgtatatttaatgcatacaatgtgatgatttcatatatgtatatattgtgtactaattatcacaatcaaatttattacatccattaccacctatgctgtacattaaatctccagaatttgttcatcttataactgaaagtttacaccctttgattaatagcttcccattttccccacctccagcccttggcaaccaccattctactatctgtttttatgagtttgactctcttagatcccacatataagtgagatcatacaaaacttgtctttcggtgtctggcttatttcacttagcgtaatgtcctccaggtttatccaggacaggagtttcttcttttgaatggctaatagtccattgtttatatgtgttttatttatccattcatctgttgctggacacttaggctgtttccatatcttgggtattgtgaatagtgttgtaataaacatggggcgcagatctctcttcaaggttctaacctgattgctgaatcgtatggtagttctgcttctaattttttgaggaacctccatactgttttctgtaaaggttataccactttacattccaaccaacagtgtacaagggttctctttcctctatgctttcgccaacacttgttatctcttgtcgtttttttataagagccatcctatcctatgaggcaatatctcactgtggttttgatttgcatttctctgatgattagtggtgttgagcaccttttcatatgctggctggccatttgtatatcttccttggggaaaaaagtccattggggtcctttgcctatttttaattgcgttattcatgtatttattaatttttgctattgaattgtgtgaattccttatattttttcaaataaccccttatcaaatatatgggtcgcaaatattttcttccatcccgtaggttgccttttcattttgtcatggtttcctttgctgtgtaaaaccttttaagattgatgtagtcccatttatttattttcacttttgttgcctgtgctttggtgttacatcaaaaaaaatattgccaattatgaccaatgtcgaggagatttttccctatgtttacttccaggatttacatggtttcagatattacatttaaatctttaatccactttgagctaattttcggtatatgatgtaaaacaagtgtgcaatttcattctttttcatgcactttccccaacaccattcattgaagagagtttcctttctacattgtgcctttttttttttttacagtacagtgaaagcaagtctattaagaaagtaaaggaataaaagaatctacattgtatatccttcatggccttgtcaaagatctgttgaccatatatgcacggggttatttctgggtgagcttggcattttttttttttttttttttttttgagacagagtctcgctctgtcgcccaggccggactgcggactgcagtggcgcaatctcggctcactgcaagctccgcttcccgggttcacgccattctcctgcctcagcctcccgagtagctgggaccacaggcgcccgccaccgcgcccggctaattttttgtatttttagtagagacggggtttcaccttgttagccaggatggtctcgatctcctgacctcatgatccacccgcctcggcctcccaaagtgctgggattacaggcgtgagccaccgcgcccggccgagcttggcatttttatctacctcattctaccgatgaggaggccgagtctcagagagttcacagacctgcctaaggtcactcagctagaggtgatacaaccagggtttgaactgagatctgccaagcttctgagtttattctttttcccccacaccaaggatcctcaattctgccttactgacatcaggatccggtcaattctttgtgatgggggctgtcctgcacctggcaggatgtttagcagcttctctggcctccacccactggatgccaggggaatgcagaagaggcttgttcattctcccatttaatcctcaggacaatatctgacataaatgttacgtcttttattttataaatgaagaaaatgagactcagaaaggtttaagtgagttacttaagaacacacagacagcaaaggtagaactggaaaccgaacacaggtgtccacatgggacaacaaaaaagttcacgttccatcttcttttgagtctctcatttcaataattaccattgtgtggatatgagctgaagtacaggaaacctggggctgaactctcctcccatcaggcctaggagccccagaccagaaccccagcccaaggtctcccagtcaggcccgctggcgtgagctggcatctacactagcatggtctcccaaagctgcagggatgccagtctcgccgctgatgaagaaaatgaagggcatttgcttctcatgcaggctgtcgggatttaacacagattccttttcttgctctcttctcccatagcacaaaactgggtggtccatccccctcccagtgtcccaaggctttgttgcgtgttctctttaatttctcccactcttgtggtgtaccctaccctcatctccctggcaacctttctgctgtatcctctcgacacctggatcacaagaacacttgtgagaccccttaacaagttacatcccaaattatcattcccctttgtcctcagccagtgctcaggtccaacttgctctcctggggtgactttctttcctgcccaatatggtttcatcatctgtaaattggggataattaaagtcttgatcctgatatttgactctcaaagcagaaggagcaagctcagccaagtcacttcaacaagaggagaagttccttgtgaaccaaaagggcactggtcacaagggccgctccttcttctgtcaggcctctccagcacgcccttggctcagccaaagaagagactcaggctgtgcttctgcactgttgggataacataggcctcttccatgtggttccacaccaggaacatggggacaatcagacctctcccagtgtgggcataaggatacaagatcatgtcaatattgacattcataatggctgggcgcagtggcacacgcctgtaatgccagcactttgggaggctgaggtgggcagattgcttgaaccccagagttcgaaaccagcctgggcgacttggcaaaaccagtctctactgaaaatacaaaaaattggctgggcttggtggcgcacacctgtagtctcagctacttgggaggctgaggtgggaggattgctcaaacccagggaggttgaggcttcagtgagctatgatggcactgctgtactccaacctgggcaacagagtgaggccctgtctcaaaacaaaaacaaagacaaaacaacattcataatagtagcaatagctactatgtgccaagcccaggcacctctttgagtctttgctggcactctatcaggtaagcgtgcttagaagttacacgaagcacacggctcagtgtttggcccatggtaagggcctaaaaagggatagccccagtggtggggatgctgctgctgctgaccattaaccccagtctgctccaccttcttccaggcagtctgtgagatgtttcatgtccgaggcaaacagcacattcagatccccaagctctacacctccagtgtgaccaggcacctgcaccacttcaggctcatgcaggactcacagcctttggacctcagctaaaggacttgcttctcttcagcacacggggcttgtttgtgttggggtctgagccctgagcccatggtcaaggagacccccaggtctttctgaacagagacagctggcctgggggcctccctctcactgcgtgcaagaggctgttagggtgcaagactcaaggcgctgagggaggctgtttcaggagggagccccaggagggtggtggagacagaagggggcagcatctgccgaggccctactgtgtgcctggcaccgtgtggggtttctggcccatatgggctaagtgaccctgcacactcctcttaggagagaggctcagatggagaaattgcagttcaggaaggtgaagcaagctgctagcctgtggccatgttgggatctgggcctcagccttccagccacgaaggcagccaagtgtcatgaagaaggcatcacagaggcaattccaggctgtagtggtgaactttccactctgcatccccgggtgctgtgccctgtgccctgtctaaggtagccctgtgggtttctatatgtttaaattgtccccagcatcaatgatgctctcctgtggatcccaagccatggagatgtcctgggacttttcatttttaggtacctaaattgaatttcccaacacacagaagcaagacagccgccctaacagactcttgcatgcagtgagagggaggccgccaggccagctgtctctgttcagaaagacctgggggtctccttgaccatgcgctcagggctcagaccccaacacaaacaagccccgtgtgctgaagagaagcaggtcccttagctgaggtccaaaggctgtgggtcctgcatgagcctgaagtggtgcacgtccctggtcacattggaggtggagagcttggggatctgaatgtgctgtttgccttggatctttatttgtgattcagaaacagtggaataaaaggaaaggaaagaaaacctgaatggccacctcagcaggatgctccaagggtagtgtccaggtggcactgactcagatatgtgggggcttcccccacccatgctcaagagccactttgccatttcaccatctctctgtcctccacacccctcagcagcaagcacaacaagaatgtgttcaccatgaagctcaaatctcagcagaatctagagtctgaaatccaagtaagggaaagtgtagagcttcttggatgatgccctgtcaattttattttaacgaatgaaagaccagaagaagtcagtcttgaaaggagaggacaggagcatctgctggcattagcagccgtgccatcgtaggaccgactcacctggacccgcggccacctgtgcttttacatctagtcttggttaaccatgggccacttttccagcttggaaactaagcatatgctccacttcctctccttcctcattgaactctttcactaaaagaacagtgcaagagagacttaaactgtttgcctcattcttaagacctttcaggaaaagtgttggcagggaaggaaatctcccagctctgggaaacagtcttgtggattatctgctggtttcattgatctgtgctgtcctccctgcattcattaggaaaactggccttggttcaaataagaacaggatttgtcctggtgacagagaaaggtttcttctgatgtccatatatctccgagggggatgctttctccaggcagaggctgtggccaagcgatcggggggctcagagggctgctgggaaggggtgggcccctctctccccagagggaaactcctggggacctctcgagcacccctgcccatcctttaaacataaattcataaatacaaacaagtaggccattcacagaaatatataaaatatgtcataggacgggtggcactctcatatggcaataattatgacaggggccggcaaatgacctgagtgacccggagtggcctgagcactgactcccaaatgccctccataggatgttctgcatccccgagaccctttcctgggtcctcctgggccctaccaccccctagaccatccagacctcaggtcatccccctgtctgttgacagagtagtctccgttcctgaatgtgctggtcaccagcaacagcagctgctcctcctccgggaagctcagcctatacttctacatgcagagaacctggacggcacccaggtggacctaagccttcagctcccagtagacgctctgggtttcctaccctgcccagacactctgggcttccccccacacctcccctcggccggggctcctgtgtgcatctgtctctcccagtgcccagcacaggcgtggaacggaagaggtgaatggaccgatttgaacacatcatcctggattctccgttccctctcaagccctgcagctaacccatcggcaagccctggaggctctgcctccaaaatcctgcctatcccatgtgcaaacgcctctcaccacgtccactgctatttgcagttgtgtgtgtgtggaaatacttccacaaatttggaatgaacaggtcacagctgtgcctggagggaatggccagggaaatgtgccctcgccttgctgctctatccaggcccacccagctgaggatgggggacctgccaccactctcctggcagttccggactcctgggaaccggcaggtgaggacccaagagtgttttcagtgacccggctgacctggtcatccgtcagtcccaccttggcctaggcctctatacagcacagatcacagctcattccatcctggcattacactggcctgtgccctgtcctcagggtcacatccgtctcccagaagccgtgcaaccctggaaaacccaggtctaacagtcaggttcctcctccgtgcattaacaatggcgttgacgcctgctttgcggcacgctgggaggggagagggaggtgtatgctggagagctccccaggggcaaggcctggctctgcgtcacccactgtcagatcctgagagcctggggctggcccagcacgtggccaccgttccctaagagttggatttcatccctcagtgctgaaggcaggggatagagcttagacagaccccctgcgtcctgtcttctttatctacagctttctcatccttgcccctttcacgtgcacccggcagagcaggtgttcactgagcttgagcaaaattcaagctagagcagctgatggatcttgaggcctagattcactgtcaaagtgtttctcaaacggtgctctccagaacaccaaggaaaactcattgactgtgtaagtctgaaaatccctgcccaccggtctacctttgtgtatgagcgatcagctctaccattcagcccaggtgtgtgtttgctggaccatgtggaggaagctgaagagacgtgagctgaaggcagagggtgagtccaaggtgggatcttgggacaggtacgagaagttaggcaaaaatgggataattctagccttcataaccttagataatagttcacattattatttagttaatagaactgtacccacattaaatttcttaaatttttttaagagataaagtctcactctgtcacccaggctggagtgcagtggtgcaatcatggctcactgcttcctggaactcgtgggctccagcaatcctcctgcctcagcctcctgactaggtgggactataggcacacgccaccatgcctggctaatttctttgacttttctctagagaccgggtccacctaggtttcccaggctggtctcagacttctagactcaagtgaacctgaacctcccgcctcgacctctcaaattgctgggattacaggtgtgagccaccacacccggcctaaatttcttatgtgccatgggactgcaaaacatcattattaggggcagctggatggaaggtataggaggatactatagtgccttttcaatatttctgtctaaaatctaaaatcatttcaacaggaaacatttatttcaaaacatgaaggtggttatccttccatgagtttgaagtacaaaggcaggctcacggtgtcgtcagaattcagaacgatggtcgtggggctgggggtgctgggaggggctgggcatggttggctttgtgatctggggtctggtgtgttccatctctgaatctctctcgagctgcactctttcttaatacattttcataagtttaaccaaaaataaaacgaggatgcgaagcttgcttgggttgttaagcctagggaaattatccagccatgagccctggcccagatgcttctagaagcctggagggaactgagaactttccaagtggaggccgcagaggcaaggccctgaggtgggagcacacggctgttcgtccctagctctgaagggggtgccctggtcggaatcagtgctgggtgcagcgaaagccgatctcacccgctccgcagggtgttcagcctgccagcagggggccagctggtcctcctgggatatggcacggacccagcagctctgtctgaaatcataatggcggaaccaagggccctctacgtccaggtccgttgggaggcggggcatggagttccactgcaggaatctccaggaaccctgaggtcctccctgagccagggccgggctgggcacaccctgagtgcccacagggtaggtgtcttcccggacagccccaccaggacagggtgtggaagaacgaggtgcccgtggcggggaagctgaccaaatgggccgcgggaaccgggctggtgggcctggaggggcctgcctgtcccccttgcagagggtcttcccgccacgtgaagccggcacaggcctggatgccgacgacccttgctcgggtttggctgaaaggaaaacagacgcggtcagcatctccagtgagcccacgcaggcctttccgggctgggccccacctgcctgcgtctctggagtcctcggggtctctgtgtggcccccgtggcctgacaccgaggacacgcctgtagtctgctgatcccagagggaggggtgcgtgctgcctggcgtggggaagctgtcgtggcatggcgggtggctcctgggactgcccccagggttcagactggctgggggcttcctgccacacaccttcgtcccagggctgttgggcctgggatacggcccccagtcagaactcaggtgggaggggccttggatgtcacccagccccttgtcacctcacgtggggacccgtctccgcagtgggtgattgggcccggacgtgggtcaccctctgccctcctgggctgcccagtccatgccaggactgaccgttcccacttctggctgaactcttggctctggctctgggcccggggtcccgcctgtgccctctccctgaatgctctgtgggtcagggacacggattcccttgtctccctggctccaggcttcttgtcctggcaaccttggaggagcgtgcaggagtgaggggcctctgctgctctctgaggctgtgggtgcttgcagggaggggcggggtctcccacaaatgggtctgggctcgtctagtaacttggagggccctgcgagggggagagggagacaccgtggaaagtgggagggggcttgttggagggtcttgcccacatccccctcctgcgtgcacagcatgtccagtatacacgcactgagcgcctgccctgaggaccggtgggcctcctgtactttcttagagtccaggaggaagaggaggaagaaaaggtgaagaggaaggcccaggtagtagggttgcgggtcccgggcactcccctactactgactaccccagagggtgacatgggaggggacatggcactggagcccacctgggggttgcaggtccccctgctttcttgttagtttcttcatagaggccctaagatgcttgagcacagtgtcctcatccctggcccaggtatcaacgaaccggttgcaaaaacgtgcccacgggccacacctggacgtcttcgtgaggcgctctagggacagggtggatatcaggccaggggagttacctgggaatggtcacagctcataccccgtggccacttcagtctcctactgggcggtgccggatccttttgtggccaccccaggtgtccagatacacacaggagactgtggctggggggcgatccggacagggaagtgctcaccacactctcgactttcatctgggtcatgtgggggatgggctcggtgtcacagtgtcctgcccagcccacctggccagacctccctctgggccagaacagaggatcatgaggacagtgtgaggaagctgccctcgggccagtcggggtctgaccccagggctccccaggccccgctgggcacacgtagacttactctgctgaaccttaaaggcgattcttgttatcggcatcaacgcctgttcgccttctaccagatacacgtcccacaggcgcagggtgagcccgagagagatctgtggggacagcaggtgtgaaagaacctggtccttccaggctggggctggtggctcgagctgcgcacactggggcttcagtctccagagtcagtgaccttccccatgagggtcgcctgagccctccaggacgctgggtcagacaaggtcttgaagctcctcatggggggcactcatttgagtggggatgtggctcctggagagaggggcttgcccagggcttgaggcttccctgagccctctcaagtcgggtcctggcccagtctgcccatgaggctgggcctgagccccagccatggccctgggatgaccccccttgggcagagggttttgcttgtgtgtcctttggggacccgcctgagcctcctgtgggctgggagtgagccagacccccgggctggggaagcagggcactgcagggcaaggaaggtccctgagccagggtctccctatgcctccttaccccgtcaatcaatatccggatgaggcagcctaacggggaacactgcccacatagatctttcttgtcctgatggaagcaacagaggtgctcaggccactgggctgccctaaaaacctccctcttccagggcctctgaagacccttcccctagtgcagaacactgggcggtgtccagagctccccacaacactgtcaccttcccacactcccggtggacacactgccctttgccctgctctgcgggagctgggcccccatccctgtgcctctgtctcctccagggcaggaaaggaaaccaactcccagcccatggagaacccgacgtcccaggtcaggccctggctgggactcagccagtcaccagccccacgaggggctccagcccccctgctcctacagccccacgggaggcagggcctctgggaagagctgaggggaccataaactcacctgatgccccatggtcttgggttgtgacgtggctaccacatgctcctgttggtcttggagcccctggacggtcccgccatttgggctgtgaaatcctgagaagcccccagcccatcatgaaatcagagccttcccccaagatgtggagccatcagctgcaagagctgggcagctggagaggcccccaaaccccaaggcctcccaccctcccatctggtgaccccaacatgcggcctttaccctggggaggtggggcgggaacattccctggagcctggctggaggttcccctggaggcctcctgggccagggtgcaaaaagggcaagcctgactttcaggccacgacagggtggccggaactgggtgggcgctgggcttcccggtcatctcctggtagtggggtcgggccagggaacaggggatggggagatgctgccacctgggcttggtcggcccgttcgtgggcaccgatggcagcaggagcccgggcagctggagggcaggaggactctcagggaggggagagtcagctgcacagaatcagagccggagggcgtggctccaggacacagagggtggccacggggaggatgagatgccctctgctgatggggatgagaggcgtctgatttgggctttgggggtcagccgtggactcctgtgggaccctcagcagagacatcctaaagtctcccaacaagctggcgacacaaggagggtgccttggctgaaagctgtgatcacctggccagggtggccatccccaggtctggctgcaggaggtccccggggcagctgttcacttaccctgcagggagtgcctctcactggccagcagctgcaccagtgcccagaatgcatcctcctcaggaagatagaggaggaacaaggcggcgatgtggctcaggtccctgcagtagcccacctcctgcaagagccagagtcaccatggaaggacatcacctgggagggctgaggtcacctgggaggactcatgtcattggagagggcagaggtgactggagaggcttcctctgaaggagaggcttcctctgaaaaagaggcttcctcaggatgcacattcatttcatgacaagagccaagtccatcaggcacttcagcaccttgtccaaaatgtctgctgatagcaccatcctgtgtgcgatgctgccaagctcctgggctttggggcagccccaggaggagggcgtcatttcttgttctgagaagtggtggtcaggcccaggtgacaccaggagtccaggccctgactcctttgtgtctcagcttgaccccttgagaccacccccttccttggaggtttatgccagcggtgagctgacatcctacctcctatatcctggtgggtcacaaatactaactgtaaaagaagcaacgacacccccaccagacacccactcctgtcaatatggaaatatggcccgggaacctcactgccgggaatactcaccgggttatactcctcatatgccaggaggatgtggagtagttcccgctgcctaggaaacagagaaagggggctttggtttgttttgtgcagatgttgttaatttcactttgtctacaaagcctaacagcaaatcccatttcaggttcagatgtttcaccagataagcagtgagctcttcagggcctgagactcttgaagaaatgtttcagtaaaatccacatctgtgacatgcaaatagcccagttgtacagtgacttgcctgatccttttcactctgaatgattttttttttcagtttgcacacacgccagttcagtctgtgggtgtacagttcctccacggttccaaaccgatgtgcagagtctcccggccaccgctccagcccctcctggggcgactccttcatcctccaagtctccagggtggcccctatgcacccagcctctccccgatccgtcagcccctggccacccagactgcttctcagtccctgtggtttggccttttccagaatggcctaggaatgggaatcctactgtggtagcttattgggtctggcttctgtccctcagcaaaatgcatctaggatccacccacgttcgtgcgggcatcaccggctcgttcccttttctcactgggtcttccgtttgaagggaggaccagccttgctctccccatccccgtgttgaaggccgtccccgaaggctccgtgtgtgagtgacgaggagtcaagcagtgaacctggcatgctggtttcatgtggatgtcagtttgcaaatcagtgggttcaatatctgtgacactttggggatgtgtggttcaagtccatcgagctttgtgagccactgcccaacgggctgccaacgtggctgtgccatgtcatgttcccagcggacctggatgagagtttccaggacccctaattctcccagcatttggtgctgtcactgttgcctgggggtggctcatgggccctctatcctgccaccctcccgtgggtcctaccatgggtccccatgggtcagggagagcacccttcaccattgtgcatgattttgtttgctgccttccatctcctcaggatcctcctgggttctggccccacatgttccagtctggcccagggcttggaaccagggaggtgctcggttcatggtgccggctgctccctgggccgggagagctcttggcagctgtgtcatccctcctgggtgaccctggcttctgctccggggaagcccccatccctctcattcaccccatctctgctgggaccctgtggctcccgtaggcttacttggttccgtatcgatccctgaagaatatatgcttccttaatgtcccgcttacgtcccggtcgatgcgctggatgtgctcagatgacctcttgcccttctccttcatgatctgtagggcagggccaagaggaggaagcagtctcagaacagatggaagactccctgcccccagtggcagtcagcccacagtcagcacttcgggaaggaaggacagaaggaaggtttccttctgcagaaagctgcattttggcttgttactgaagccagggagggtcaccagagctgagtttgtctgtggtgactgtgtcaccatctgtgcccagggtgttcatctgaccttcacccccagctccccagggtggtcttgacgttccctccagctggagacctgggccccgacacggcctgtcctgtttgttgtgctctggctgagcgtacctggtatcttccggggtttttcaacttcatttcctcagtgttcaggaggactgaccacatcgggccccggatgttcatgggcattcccttgtacgctcgatctatgagctgtgggcagaaaacgatctggtgtcacaggccacggggtgaccccagtgaggaccagagcccggggattctggaaattgtcggttttggccccatgattcctcagtagaggtgagatcaagctgggacagggtctcccttcccaggactgaaagagtggatggacactcagagtcgaaactctgatctgaaccttttccttccttcaggtcaccagggcatccctagccttgagctccgggtagtcccagccctagattcagattccctccctgcaaggtgacgcttgcacgaataggcaggaaatctggcgaccaggcctgcagtcctctgggcgaggacagtgtgccgcccaccctctgagaggctgatggtgccaggccacagccatgggtgcctgtcccctgtctctgcagagagtgcttcctccctccacacgttacctttctgctgcttttgtatttctcccagtctcccagcatatccacccacttgctctttcggctgatctcccgccgaatttgctgtcaaatgaggcatgttggagttagcggagctgccaggcttcccagagccgcccgcggatgctgggtcttgggctctggagccctggtgggagccagctggaaggagccagggaagggcagacctcaagggctgagagcctttgagcaaatgagcaccagtgggctggctttgggaccccgggatgtaccatcctcaggccacagacacaccagtcttaggtcccagcctctaggtggggtcctgacacaagcgcgcagccacccccaagccaggactgtggttctccttttggaattttatcaaactgccaaagtgaacagcaacctggggtcaggtccagcagggactgctgcccctcccagtgacagcgtgttgccctcacccgccaccgctcaggccagctgcttcctctgcctcactgaccacccgcccagtccctacgtccctggaccagcccctccacgcatcaggctcttaccttcgcctcccgcgcagtcagaggaggcagctccgtctcactgtaaggcaacccaggcagagctgaggaactgcacggggcctggagcggccccagcctgggtgccgacccccagaaaggactggctctgtccctttccagctcagggctcagcccaggagaaggcacagggaagggaggacaagggccttcctgtggggctgactcccaggaggggcaggacctgggagaagaaggagtgtagggacagcctggccggggttactggggcccctggcgtggggggcggtcaggctgcccaatggggctgcccgtcctggactcgaggtggtgctttctgctggagctgagaaaggttagccctgagatgggatgggggccgcccagggtgggcgaccgggccctgacaggagtccctcagggagtgaccacatccccccgccagggtcaagggagcctgccctgagacctgcccggtgtactctggctgcaccaggggcccaccccacttgacagccccaaggcccttgcaggttctgacctcccagcatccacctgcctctccctgcacccgagccacacaccctgcgtttcagaagtggcacggctcgtcagctccctcccgccctacctccccagggatcctctgtctctccatcctgtgatccctgagggatgggctcctggctgggctcctcttacccggccccagatcccttcccagcaccagacccaggtctttagccgcgagccctgctgcctccctggcctcaccgtgagatgcccagaacggggccctgcccatcttctcccccgttctcctagggctacagcccccattgtcaccatgccttttcccctcacgggacagtgagggctgtagctctaggggaatgggggagaacaggggcaggtgggccctcagagacctgctggacaacagccctgaggctgggccaggcgtctcctcaccctgtggccataacccttgcatctcaccggggttgtctccaagtagacagggccagaccctcaggctgccccgctcctcttgtgctcacttgccgacagaactgctgagcgcccaggggcctgacctagcccagtctccattcccaccggctccctagatgggccccacacctctggcctaacaacctcgggctggacctgcaggggagtcagggaggagttctgtccctggaaaggaggttgacccgacctggtgagacatgtcctgcgtcagaaaggcctttctaaaagcaaacccatccctgagctgagacaggtgctttaggggtgaggggagtgcagaggactcactgtacaatccccaaatgatcgacgttgttgttgtagcttcgaaaaggcttaggccccttgtcctctggcagcccagctcggtgtccctgtagcccagagggagccttggtgaggggtccaaggtaaagggtgcaagggcctgggggcattggccacccgtccctgccctgtgctcctagggagcccaggaccctttgaccagggcacactggaagaggcctccctccaagaagcagaccgacttgtaccttttcgtatttcataatgatgtcctctcgctcttgtgcccaccaactgcccgcgacctctaccacgtccatcctgtgagacagaattgtctaaaggtcacaccgtacgcggcggcttcggagaacacctgaaccgctctcgccgggctcccagatgctggctggctgcgtaacccccattccaccgccgcccccagggaaaaaggggccagacccagtggcccacagctgctccagtctctggagtctcaagtcccaagcaggggtgggcatcttcccaaggacttgagtacagtgggacctagacagagaatcctgttgtcccccaatgccatgaaatggggacacaccggccccagcaggttgaatggtttccacctgccaagggtgaagggcccatgatgggctattccagggatgtggaggcagactggggtcagcgaccagaggtctctgtgcaatcggcctcctgggatgctcagggcctcagcgatgcccagtttcctacagggaacaagatctctcccgactgctcggttctactccgctcatcactttggctaccgtggctcttcagtctgaacagtgaagccactttaggaataacgcctgttgagcaggagggtgttgggtttgggggatgagaaagatctattgtacgcatggaaaccacgtctctcgcggagggactgtggagtccaccattctgagccgtcccaacaggaggaggcttcattttcctgggtcactgaggaagaacagtgggtccttggtcctggagaacagctggatggaccgtccctcctgggaatactcgaggcaaaaggagggcgaggcctcaagaggaccacgcagagcaagaaatacctggggagaaccctagtgcccggacccctttgaacacaagggaagatagtctcccctcagccagccctccagggctccttcattttccacagctgcccaagggcagcaggctcccccggacaagggaccatgtgtgttcagtggggcccacagcgaccatcaggacccagcttagggcacagaggtgttctgaggaccgtcagtggatctgtaccagtggctctataccagtggctctgccaggaccaggctctgccccatcgggatgggaaacctgggcagatttgggatctagggcagggaggtcacagggttcaggcctgaattccagcacagcacacggcagggctgagagcaaaactcagggtcatgtccggattcccaggccggttactgcctctctgaccccagacgtctcatctgtcgaatggggacatttgggaacagcacccactctacgaagccaccatggagacgaaagagccaatcgtctacacgggcagtgtagaacgggcgcctggtgagtgctcagggatgaccctcctcggtagctgccccacagaggccaacaccgcccgcaccgtagccactgcccccaagtccgcctggagggaagagagcaggtcacgctcacctgattctgatgaatcagctggcctgggtcgtgcctctcagggagaaaacctttgagtccacagagctgctcacagataccactgcctgtgtgtaactgctgtagaccactgaggcagaccagagagcagataggtgctaagcaccagtgacattctgaggtcatggcacgaatcacagtggggccttgcccgggtcagcagcgcccagagtcagggtcctccgctgcctgaggcgtcaacatgcctgcctgcaatgtgtttgtgcacgtgcgtgcacatgtgtatgtgggtaaacacatctgtgcacgtgtgtgctgcttctctggccaggcccggctgccccactcatgtgtgcacccagttcctcatcactgtcacccccgaggcccagggccagcatcagagcatccatggctgctccctaacctcagccctccccgcccagggtggtcctgggatacacatagcggtggagggaagtgactgctgctgttggatctcagaatacaaaagctagtactattacctaatggtctttttagtgtctctaatggtatcgctttttcatttctgatattttaactgggtatttctctccatgacccttggatattctagctagaggatcctgtggggaaagtgccgggcacacagttaggggctcactcttctagacatgttatctaaaacctggttcatctgtccttccacacagggcctaggggatgccaaattccaggggccagaaagagcttgggataaaaagaaacttcaaggggacggctttgacctgggctgagtctgcctgtgccatccaactggagtctcaagtcctgaggcaggacgtccagatgccccagtgcagggtcctcctgatcaacacctgctcccctgtactcattagcaacctcacccaccctactctcaaagcacacttggctctcgtatccaggagctctgcatctgtagattcagcaacagcagatggaaaatattcagaaaataaattggacggttatgtttctattgaacatgtgcagagtttgttcttgtcattattccctaaagaatccagtatcacgaccatttatgtagcatctgcattgtattacacatcatgaataatccagagatggtctaatgtctacgggaggatgtgcatagctgatatgtaaatactaggccatgttatgtcagagacttgaggatccatggattttggcatccccggggaccctagaactaatccatggataccaagggatgactgtataaactcactcaggaaggcttctcattggaggaaggtcccagttcaggacacacagggacatctccctggactactgtccattcatccatccattcatccattgtctccccccacccccccatctcggactgtcccagtgacagccctagcaagaagagacaagaaacaagttcacgttgtccagttttgaggtaatggaagaagttgcaccagtatgagaatagtgggtcagttttctacaggatgcagaaagcatatcgggcagcctcggggtgcggaaaggagcctggcctctctagcagccacacaggcctgcagtaggatggggctgtggctggccatgtggatcacttgggcctcatgaggggaaaggaaataccaggggggcagaagaggagcatgggggcagctggttgcctaaggagaaggcacctcagggaaggggactgtattcatttgttttcacactgatgtaaagaaatacctgagattgggtaatttataaaggaaacaggcttaattgacttgcagttccggaaacttacaatcatggcagaaggggaaggggaagcaggcaccttcttcacaagatggcaggagggagattgtgcagtggcacaatctcggctcactgcaacctctgcctcccgggttcaggcagttctcctgcctcagcctccctagtagctgggattacaggcatgcaccaccacgcctggctaattttgtatttttagtagagacagggtttcaccatgttggccaggctggtcttgaactcctgacatcaggtgatctgcctgcctccgcctgccaaagtgctgggattacaagtgtgagccaccgcgccaagccatatctgttctttttttttttttttttttttgagacagagtctcactctgttgcctaggccaggctggagtgtgcagtggtgcgatctcggctcactgcaacctccacttccctagttcaagggattctcctgcctcagcctccctagtagctgggattacaggtgcatgccaccacacctggctaatttttgtatttctgtagagaccaggtttcaccatgttagctaggctggtctcaaacacccgacctcaggtgatccgcccgcctctgcctcccaaagtgctgggattacaggcatgacccaccgcgcctagtccatatctgttctttttttttttttttttttttttgagacagagtcttgctctgtcgccaaggccggagtgcagtggcgtgatctcagctcactgcaacctccgcctcccgggtttaagcgattctcctgcctcatccaagtagctgggactacaggcacctgccatcatgccaggctaatttttgaatttttagtagagaaggggtttcaccatattggccaggctggtctcgaactcgtgaccttgtgatccacccgcctcggcctcccaaagtgctgggattacaggcctgagccaccgcacctggctagcctgtgtctgttctttaaaattgttttgttttccttactctcagattcttcttgctgcttattgtgccttgttgctgcctgttgtgcaatttcttccctcttgtattttactgaacttcatctgaagaagccttagtagccagataaacaagcttgtttgggctaaaaaatcaattgctgtgtgagagtttgttggattctcttctgagtaaagggtatgtgttttattgtacggactttgtatcacctattttggcttttcatccaggccttttttttttttctttctttttagcttcctggttctagatacaactgatactctgatacaacctgggtaaatgtggtcttgagtagtaaattatctgtgaagcttctccgaactttgccacataaatgagcctgctcttgttgtgaagtaaatcttactctaatctgtatgtgagtcagtgggaaataactgagccttcggatggcttttgttgttaactgagattagttctctagattttagtgattttgttttgaacaccatacaagtatgtggttcttggtttatttggtcacttgtaatctctttaaaattttattttaaattaggaagtattttagaaatacaagaaagtcacacactatgagattaaacagatgttaacattttgccccattttcatcagactgtgcatgctttttttgggggggaataaaatgtcacagataccactaaagcccgtttccatctcgtcccaccctgcctctagaagtaacttctttcttcaggtaggtgcgtattattcctttttattcctacgtatagtttaaaactttaattgcatattagtagccacaaacatcacataccaatattctgtgccttttgcatttttacattaatggtaattatttttgaccttctgcaaatggctcttttcagtgtttcttgttagaaaacttggctcaacttgagtttactaattatctgcttcttcttgtctttagctattatagaactgttccaccaaggcaacaattattgctattttaatggtgaaatcagttttattaggcaaattgactcaggcttcagactggcatttggaattgtcacactggagattttcttttactgaagtctcaggacattgacaatcagaaaaaaaccctcttgagtcttactatcgtacatgtaagatatgttcctgagtgactatagtaaagactcattcaggaaaatgttatctccgatttctgcctccctagctcataggaaacttccattgtaaagttgttaccaggcgtcaagctgcctctttggtacagcccttacttagtatttggctcagttgaagtgcagtctatataggaggccaagaagacttaatcctgggtttgaaacaaagcaaggatacactaacattctatcctttaataacatcaagtagaaaaattgaaaatgagcttgttatcagtgcacttttatatgccaaccttgtttcacttgtgttttaaactgggaaactgaagattttaatgctgaaatttctttgaattattacctgtttttttgatagtggaacacacagctaatatttactaatatgaaggtgtcaaaggtgagaaatcatgtactacaccatcaggtcagcactactgtttggaagagcagcatcacaaagagcagtgttatactgcgttgtagtcagcacatacacttatgtccagacagatattttaaattaccttcttggggtagtacacatatgctgatatccaaagtgccatataatacaatacatagtttttaaacttcatatcattctgatcagaagctttataaactgttaggtgaatgctgttagatgatatgagagcacaatttaacctgtgtgtgtgtatatgtatgtcttaacatctattaagtgatgactacatatgaggcactaagtgctaaaacagagactttacatagattatcccattattggtcaactttttaaataagtgcatctctaatataagacaagatgctgaccaatttttaaaatgtgaatggatttctatttttaagataagtacctttgttcctttggttcctccctcccacccttccagaaatggtagtatcctggaaaaaaaaaattagtagcaattcaagaaacagcttaattcattagtataaatagatgagtttcccctaaacacaggaggagttggaaggtacttgaaattggatgttgtgcatggtgcctttccaaaatgcacaaatactttctctcaaatggttgcagtagtaatgtgctgtgtgatttggcatgtataatgttgtacaggtatcttgacattggtggattaactgcttggctactgtgaaattcactgtagatgttgatggatgaaagtgtggttgcctaggtaatgattaagaccagtaactaaaccacagttattattttgctggcataaacttcaaactcagaaaggtttttattcattttacccattggagcataccccagtaagtgcttcatttctttgtgtttctgattttttttttttttaagatggagtcttgcttttgtcgcccaggttggagtgcaatggcgcgatttcggctcactgcaacctccacctcctgggttcaagcgattctcctgcctcagcctcccgagtagctgggattacaggtgcctgccaccacgcccagctaatctttgtatttttagtagagatggggtttcaccatgttagccaggctggtctcgaacccctgacctcgtgatccacccaccttggcctcccaaagttctgggattacaggcatgagctgccgtgcccagccatgtttctgaatttttaagtcaacttctgaataggcaaagaattctttttgtttttttgttcaactttagtgctataaatcgccagttggacacaaaggttttagtgctatttaggtatgttttggtgaaatagtgtgaaggaatattgctgcttaaaagataagccattcattaaatgacgtctttgttttgaaacatgaagacttatgagaagcattttttttgtaagccaaagtagtttcactttatgtgttacagattttgaatagctcattatagactttgtaatttactgtctctcatttaggcaggtaattttagttgccagctaatcatgtttaaatatgtattggttattaataaatgattacccgtatacaggtctttcatgcagatagcgtactactctgatgttcttacctagttttgtggtatgttcagttgtctaagagcattgttgatctgcacacagattttgtttggtctatacagtgtttctgaaaacttgaattagttaccattaataaaaaatagagagactgcacatgaaatctgaatttgtagcttttaaaaaaaaaaattggaagatcaggccaggtgcggtggctcatgcctgtaatcccagcactttgggaggccgaggcggtcagatcacctgaggtcgggagttcgagaccagcctgaccaacatggagaaaccccgtctgtactagaaatacaaaatttaccgggcgtggtggcacatgcctgtaatcccagctactagggaggctgaggcaggaaaatcgcttgaacctgggaggcggaggttgcggtgagccgagatcacgccattgcactccagcctgggcaacaagagcaaaactccgtctcaaaaaaaaaaaaaaaaattggaagatctgtcagcactaaacctgccagtcaccatagcgataattctttggctccaagaaatggctaccacctccttcttttaaggggttgtgcacagcttccacatggcttgctacacttacctgcctcaggaagcatttctttgtgatttagggcatctgtgtttttgttattttagatttagaacattcaaatgtctggaaatgaatttgaagttttgttttaagcaaggttatgactaaattgaaaaatgcacaagaggccaggcgtggtggctgacgtctgtaatctcagcactttgggaggctgagacgggcgaatcacgaggtcaggagtttgagaccagcctgaccaacaaggtgaaaccccatctctactaaaaatacaaaaattagatgggtgtggtgttgcacacctgtaatcccagctactcaggaggctgaggcaggagaatcaccaccgagtgtggtggctcacacctgtaatcctagcacttttggagggtcaggcaggcagatcacttgaggccaggaattcaagaccagcctggctgacatagagagtagagagaccccatctccactaaaaatacaaaaattaaggccgggcacggtggctcacgcctgtaatcccagcactttgggaggccgaggcaggcggatcatgaggtcaggagatcgagaccatcctggctaacatggtgaaaccccgtctctgctaaaaatacaaaaaattagccgggcatggtggcaggtgcctgtagtcccagctactcgggaggctgaggcaggagaatgatgtgaacctgggagacggagcttgcagtgagcggagattgtgccaccgcgctccagcctgagcaacagagcaagactctgtctcaaaaataaataaataaataaataaacaaacaaactagcatcttggtccatgttttcctgtgcacacatgagagaatttttccatggaaaggaacctaatagtggactttctggattgttggacataaatcttcaactttaccaagaactgccaaattatcctctagagtggtgtcaactgacattcccatgagcaaagaatgaagaaatcccactttcagcatgttctgaaaaactttagtatttttgacaatctaatgggtattaaatgatagtcctggccaggcacagtggctcacgcctgtaatcccagcactttgggaggctgaggtgggtggatcacttgaggtcaggagttcaacaccagcctgaccaacatggtgaaaccccatttctactaaaaaaaaaaaaaaaaaaaaaaaaaaaaaaaattagccaggcctgtggtgcgtgcctgtaatcccagctacttggaaggctgaagcaggagaatcacttgaacccaggtagtggaggttgcagtgagctagattgagccattgcactccagcctgggcaacaagagcaaaactttgtctcaaaaattaaaaaaaaaaatttttgtactgatagtccattggtttaatcagaatttccctgattactaataacattggttactatgcatcttttctcgtgtgtgtgtgtgtgtgtgtgcacgcgccattaagtttttccactgtgaactgcttgtttaacactcttgtgcatttttcttttttttttttttttttgagatggagtctcgctctctcacccaggctggagtgcaatgatgcgatcttggctcactgcaacctccatctcctaggttcaagtgattctcctgcctcagcctcctgagtagctgggattacaggtgtgcaacaccacacccatctaatttttgtatttttagtagagatggggtttcaccttgttggtcaggctggtctcaaactcctgacctcgtgattcgcccgtctcagcctcccaaagtgctgagattacagacgtcagccaccacgcctggcctcttgtgcatttttcaatttagtcataaccttgcttaaaacaaaacttcaaattcatttccagacatttgaatgttctaaatctaaaataacaaaaacacagatgccctaaatcacaaagaaatgcttcctgaggcaggtaagtgtagcaagccatgtggaagctgtgcacaaccccttaaaagaaggaggtggtagccatttcttggagccaaagaattatcgctatggtgactggcaggtttagtgctgacagatcttccaatttttttttttttttttgagacggagttttgctcttgttgcccaggctggagtgcaatggcgtgatctcggctcaccgcaacctccgcctcccaggttcaagcgattttcctgcctcagcctccctagtagctgggattacaggcatgtgccaccacgcccggtaaattttgtatttctagtacagacggggtttctccatgttggtcaggctggtctcgaactcccgacctcaggtgatctgaccgcctcggcctcccaaagtgctgggattacaggcatgagccaccgcacctggcctgatcttccaatttttttttttaaaagctacaaattcagatttcatgtgcagtctctctattttttattaatggtaactaattcaagttttcagaaacactgtatagaccaaacaaaatctgtgtgcagatcaacaatgctcttagacaactgaacataccacaaaactaggtaagaacatcagagtagtacgctatctgcatgaaagacctgtatacgggtaatcatttattaataaccaatacatatttaaacatgattagctggcaactaaaattacctgcctaaatgagagacagtaaattacaaagtctataatgagctattcaaaatctgtaacacataaagtgaaactactttggcttacaaaaaaaatgcttctcataagtcttcatgtttcaaaacaaagacgtcatttaatgaatggcttatcttttaagcagcaatattccttcacactatttcaccaaaacatacctaaatagcactaaaacctttgtgtccaactggcgatttatagcactaaagttgaacaaaaaaacaaaaagaattctttgcctattcagaagttgacttaaaaattcagaaacatggctgggcacggcagctcatgcctgtaatcccagaactttgggaggccaaggtgggtggatcacgaggtcaggggttcgagaccagcctggctaacatggtgaaaccccatctctactaaaaatacaaagattagctgggcgtggtggcaggcacctgtaatcccagctactcgggaggctgaggcaggagaatcgcttgaacccaggaggtggaggttgcagtgagccgaaatcgcgccattgcactccaacctgggcgacaaaagcaagactccatcttaaaaaaaaaaaaaatcagaaacacaaagaaatgaagcacttactggggtatgctccaatgggtaaaatgaataaaaacctttctgagtttgaagtttatgccagcaaaataataactgtggtttagttactggtcttaatcattacctaggcaaccacactttcatccatcaacatctacagtgaatttcacagtagccaagcagttaatccaccaatgtcaagatacctgtacaacattatacatgccaaatcacacagcacattactactgcaaccatttgagagaaagtatttgtgcattttggaaaggcaccatgcacaacatccaatttcaagtaccttccaactcctcctgtgtttaggggaaactcatctatttatactaatgaattaagctgtttcttgaattgctactaattttttttttccaggatactaccatttctggaagggtgggagggaggaaccaaaggaacaaaggtacttatcttaaaaatagaaatccattcacattttaaaaattggtcagcatcttgtcttatattagagatgcacttatttaaaaagttgaccaataatgggataatctatgtaaagtctctgttttagcacttagtgcctcatatgtagtcatcacttaatagatgttaagacatacatatacacacacacaggttaaattgtgctctcatatcatctaacagcattcacctaacagtttataaagcttctgatcagaatgatatgaagtttaaaaactatgtattgtattatatggcactttggatatcagcatatgtgtactaccccaagaaggtaatttaaaatatctgtctggacataagtgtatgtgctgactacaacgcagtataacactgctctttgtgatgctgctcttccaaacagtagtgctgacctgatggtgtagtacatgatttctcacctttgacaccttcatattagtaaatattagctgtgtgttccactatcaaaaaaacaggtaataattcaaagaaatttcagcattaaaatcttcagtttcccagtttaaaacacaagtgaaacaaggttggcatataaaagtgcactgataacaagctcattttcaatttttctacttgatgttattaaaggatagaatgttagtgtatccttgctttgtttcaaacccaggattaagtcttcttggcctcctatatagactgcacttcaactgagccaaatactaagtaagggctgtaccaaagaggcagcttgacgcctggtaacaactttacaatggaagtttcctatgagctagggaggcagaaatcggagataacattttcctgaatgagtctttactatagtcactcaggaacatatcttacatgtacgatagtaagactcaagagggtttttttctgattgtcaatgtcctgagacttcagtaaaagaaaatctccagtgtgacaattccaaatgccagtctgaagcctgagtcaatttgcctaataaaactgatttcaccattaaaatagcaataattgttgccttggtggaacagttctataatagctaaagacaagaagaagcagataattagtaaactcaagttgagccaagttttctaacaagaaacactgaaaagagccatttgcagaaggtcaaaaataattaccattaatgtaaaaatgcaaaaggcacagaatattggtatgtgatgtttgtggctactaatatgcaattaaagttttaaactatacgtaggaataaaaaggaataatacgcacctacctgaagaaagaagttacttctagaggcagggtgggacgagatggaaacgggctttagtggtatctgtgacattttattcccccccaaaaaaagcatgcacagtctgatgaaaatggggcaaaatgttaacatctgtttaatctcatagtgtgtgactttcttgtatttctaaaatacttcctaatttaaaataaaattttaaagagattacaagtgaccaaataaaccaagaaccacatacttgtatggtgttcaaaacaaaatcactaaaatctagagaactaatctcagttaacaacaaaagccatccgaaggctcagttatttcccactgactcacatacagattagagtaagatttacttcacaacaagagcaggctcatttatgtggcaaagttcggagaagcttcacagataatttactactcaagaccacatttacccaggttgtatcagagtatcagttgtatctagaaccaggaagctaaaaagaaagaaaaaaaaaaaaggcctggatgaaaagccaaaataggtgatacaaagtccgtacaataaaacacataccctttactcagaagagaatccaacaaactctcacacagcaattgattttttagcccaaacaagcttgtttatctggctactaaggcttcttcagatgaagttcagtaaaatacaagagggaagaaattgcacaacaggcagcaacaaggcacaataagcagcaagaagaatctgagagtaaggaaaacaaaacaattttaaagaacagacacaggctagccaggtgcggtggctcaggcctgtaatcccagcactttgggaggccgaggcgggtggatcacaaggtcacgagttcgagaccagcctggccaatatggtgaaaccccttctctactaaaaattcaaaaattagcctggcatgatggcaggtgcctgtagtcccagctacttggatgaggcaggagaatcgcttaaacccgggaggcggaggttgcagtgagctgagatcacgccactgcactccggccttggcgacagagcaagactctgtctcaaaaaaaaaaaaaaaaaaaaaaagaacagatatggactaggcgcggtgggtcatgcctgtaatcccagcactttgggaggcagaggcgggcggatcacctgaggtcgggtgtttgagaccagcctagctaacatggtgaaacctggtctctacagaaatacaaaaattagccaggtgtggtggcatgcacctgtaatcccagctactagggaggctgaggcaggagaatcccttgaactagggaagtggaggttgcagtgagccgagatcgcaccactgcacactccagcctggcctaggcaacagagtgagactctgtctcaaaaaaaaaaaaaaaaaaaaagaacagatatggcttggcgcggtggctcacacttgtaatcccagcactttggcaggcggaggcaggcagatcacctgatgtcaggagttcaagaccagcctggccaacatggtgaaaccctgtctctactaaaaatacaaaattagccaggcgtggtggtgcatgcctgtaatcccagctactagggaggctgaggcaggagaactgcctgaacccgggaggcagaggttgcagtgagccgagattgtgccactgcacaatctccctcctgccatcttgtgaagaaggtgcctgcttccccttccccttctgccatgattgtaagtttccggaactgcaagtcaattaagcctgtttcctttataaattacccaatctcaggtatttctttacatcagtgtgaaaacaaatgaatacagtccccttccctgaggtgccttctccttaggcaaccagctgcccccatgctcctcttctgcccccctggtatttcctttcccctcatgaggcccaagtgatccacatggccagccacagccccatcctactgcaggcctgtgtggctgctagagaggccaggctcctttccgcaccccgaggctgcccgatatgctttctgcatcctgtagaaaactgacccactattctcatactggtgcaacttcttccattacctcaaaactggacaacgtgaacttgtttcttgtctcttcttgctagggctgtcactgggacagtccgagatgggggggtggggggagacaatggatgaatggatggatgaatggacagtagtccagggagatgtccctgtgtgtcctgaactgggaccttcctccaatgagaagccttcctgagtgagtttatacagtcatcccttggtatccatggattagttctagggtccccggggatgccaaaatccatggatcctcaagtctctgacataacatggcctagtatttacatatcagctatgcacatcctcccgtagacattagaccatctctggattattcatgatgtgtaatacaatgcagatgctacataaatggtcgtgatactggattctttagggaataatgacaagaacaaactctgcacatgttcaatagaaacataaccgtccaatttattttctgaatattttccatctgctgttgctgaatctacagatgcagagctcctggatacgagagccaagtgtgctttgagagtagggtgggtgaggttgctaatgagtacaggggagcaggtgttgatcaggaggaccctgcactggggcatctggacgtcctgcctcaggacttgagactccagttggatggcacaggcagactcagcccaggtcaaagccgtccccttgaagtttctttttatcccaagctctttctggcccctggaatttggcatcccctaggccctgtgtggaaggacagatgaaccaggttttagataacatgtctagaagagtgagcccctaactgtgtgcccggcactttccccacaggatcctctagctagaatatccaagggtcatggagagaaatacccagttaaaatatcagaaatgaaaaagcgataccattagagacactaaaaagaccattaggtaatagtactagcttttgtattctgagatccaacagcagcagtcacttccctccaccgctatgtgtatcccaggaccaccctgggcggggagggctgaggttagggagcagccatggatgctctgatgctggccctgggcctcgggggtgacagtgatgaggaactgggtgcacacatgagtggggcagccgggcctggccagagaagcagcacacacgtgcacagatgtgtttacccacatacacatgtgcacgcacgtgcacaaacacattgcaggcaggcatgttgacgcctcaggcagcggaggaccctgactctgggcgctgctgacccgggcaaggccccactgtgattcgtgccatgacctcagaatgtcactggtgcttagcacctatctgctctctggtctgcctcagtggtctacagcagttacacacaggcagtggtatctgtgagcagctctgtggactcaaaggttttctccctgagaggcacgacccaggccagctgattcatcagaatcaggtgagcgtgacctgctctcttccctccaggcggacttgggggcagtggctacggtgcgggcggtgttggcctctgtggggcagctaccgaggagggtcatccctgagcactcaccaggcgcccgttctacactgcccgtgtagacgattggctctttcgtctccatggtggcttcgtagagtgggtgctgttcccaaatgtccccattcgacagatgagacgtctggggtcagagaggcagtaaccggcctgggaatccggacatgaccctgagttttgctctcagccctgccgtgtgctgtgctggaattcaggcctgaaccctgtgacctccctgccctagatcccaaatctgcccaggtttcccatcccgatggggcagagcctggtcctggcagagccactggtatagagccactggtacagatccactgacggtcctcagaacacctctgtgccctaagctgggtcctgatggtcgctgtgggccccactgaacacacatggtcccttgtccgggggagcctgctgcccttgggcagctgtggaaaatgaaggagccctggagggctggctgaggggagactatcttcccttgtgttcaaaggggtccgggcactagggttctccccaggtatttcttgctctgcgtggtcctcttgaggcctcgccctccttttgcctcgagtattcccaggagggacggtccatccagctgttctccaggaccaaggacccactgttcttcctcagtgacccaggaaaatgaagcctcctcctgttgggacggctcagaatggtggactccacagtccctccgcgagagacgtggtttccatgcgtacaatagatctttctcatcccccaaacccaacaccctcctgctcaacaggcgttattcctaaagtggcttcactgttcagactgaagagccacggtagccaaagtgatgagcggagtagaaccgagcagtcgggagagatcttgttccctgtaggaaactgggcatcgctgaggccctgagcatcccaggaggccgattgcacagagacctctggtcgctgaccccagtctgcctccacatccctggaatagcccatcatgggcccttcacccttggcaggtggaaaccattcaacctgctggggccggtgtgtccccatttcatggcattgggggacaacaggattctctgtctaggtcccactgtactcaagtccttgggaagatgcccacccctgcttgggacttgagactccagagactggagcagctgtgggccactgggtctggcccctttttccctgggggcggcggtggaatgggggttacgcagccagccagcatctgggagcccggcgagagcggttcaggtgttctccgaagccgccgcgtacggtgtgacctttagacaattctgtctcacaggatggacgtggtagaggtcgcgggcagttggtgggcacaagagcgagaggacatcattatgaaatacgaaaaggtacaagtcggtctgcttcttggagggaggcctcttccagtgtgccctggtcaaagggtcctgggctccctaggagcacagggcagggacgggtggccaatgcccccaggcccttgcaccctttaccttggacccctcaccaaggctccctctgggctacagggacaccgagctgggctgccagaggacaaggggcctaagccttttcgaagctacaacaacaacgtcgatcatttggggattgtacagtgagtcctctgcactcccctcacccctaaagcacctgtctcagctcagggatgggtttgcttttagaaaggcctttctgacgcaggacatgtctcaccaggtcgggtcaacctcctttccagggacagaactcctccctgactcccctgcaggtccagcccgaggttgttaggccagaggtgtggggcccatctagggagccggtgggaatggagactgggctaggtcaggcccctgggcgctcagcagttctgtcggcaagtgagcacaagaggagcggggcagcctgagggtctggccctgtctacttggagacaaccccggtgagatgcaagggttatggccacagggtgaggagacgcctggcccagcctcagggctgttgtccagcaggtctctgagggcccacctgcccctgttctcccccattcccctagagctacagccctcactgtcccgtgaggggaaaaggcatggtgacaatgggggctgtagccctaggagaacgggggagaagatgggcagggccccgttctgggcatctcacggtgaggccagggaggcagcagggctcgcggctaaagacctgggtctggtgctgggaagggatctggggccgggtaagaggagcccagccaggagcccatccctcagggatcacaggatggagagacagaggatccctggggaggtagggcgggagggagctgacgagccgtgccacttctgaaacgcagggtgtgtggctcgggtgcagggagaggcaggtggatgctgggaggtcagaacctgcaagggccttggggctgtcaagtggggtgggcccctggtgcagccagagtacaccgggcaggtctcagggcaggctcccttgaccctggcggggggatgtggtcactccctgagggactcctgtcagggcccggtcgcccaccctgggcggcccccatcccatctcagggctaacctttctcagctccagcagaaagcaccacctcgagtccaggacgggcagccccattgggcagcctgaccgccccccacgccaggggccccagtaaccccggccaggctgtccctacactccttcttctcccaggtcctgcccctcctgggagtcagccccacaggaaggcccttgtcctcccttccctgtgccttctcctgggctgagccctgagctggaaagggacagagccagtcctttctgggggtcggcacccaggctggggccgctccaggccccgtgcagttcctcagctctgcctgggttgccttacagtgagacggagctgcctcctctgactgcgcgggaggcgaaggtaagagcctgatgcgtggaggggctggtccagggacgtagggactgggcgggtggtcagtgaggcagaggaagcagctggcctgagcggtggcgggtgagggcaacacgctgtcactgggaggggcagcagtccctgctggacctgaccccaggttgctgttcactttggcagtttgataaaattccaaaaggagaaccacagtcctggcttgggggtggctgcgcgcttgtgtcaggaccccacctagaggctgggacctaagactggtgtgtctgtggcctgaggatggtacatcccggggtcccaaagccagcccactggtgctcatttgctcaaaggctctcagcccttgaggtctgcccttccctggctccttccagctggctcccaccagggctccagagcccaagacccagcatccgcgggcggctctgggaagcctggcagctccgctaactccaacatgcctcatttgacagcaaattcggcgggagatcagccgaaagagcaagtgggtggatatgctgggagactgggagaaatacaaaagcagcagaaaggtaacgtgtggagggaggaagcactctctgcagagacaggggacaggcacccatggctgtggcctggcaccatcagcctctcagagggtgggcggcacactgtcctcgcccagaggactgcaggcctggtcgccagatttcctgcctattcgtgcaagcgtcaccttgcagggagggaatctgaatctagggctgggactacccggagctcaaggctagggatgccctggtgacctgaaggaaggaaaaggttcagatcagagtttcgactctgagtgtccatccactctttcagtcctgggaagggagaccctgtcccagcttgatctcacctctactgaggaatcatggggccaaaaccgacaatttccagaatccccgggctctggtcctcactggggtcaccccgtggcctgtgacaccagatcgttttctgcccacagctcatagatcgagcgtacaagggaatgcccatgaacatccggggcccgatgtggtcagtcctcctgaacactgaggaaatgaagttgaaaaaccccggaagataccaggtacgctcagccagagcacaacaaacaggacaggccgtgtcggggcccaggtctccagctggagggaacgtcaagaccaccctggggagctgggggtgaaggtcagatgaacaccctgggcacagatggtgacacagtcaccacagacaaactcagctctggtgaccctccctggcttcagtaacaagccaaaatgcagctttctgcagaaggaaaccttccttctgtccttccttcccgaagtgctgactgtgggctgactgccactgggggcagggagtcttccatctgttctgagactgcttcctcctcttggccctgccctacagatcatgaaggagaagggcaagaggtcatctgagcacatccagcgcatcgaccgggacgtaagcgggacattaaggaagcatatattcttcagggatcgatacggaaccaagtaagcctacgggagccacagggtcccagcagagatggggtgaatgagagggatgggggcttccccggagcagaagccagggtcacccaggagggatgacacagctgccaagagctctcccggcccagggagcagccggcaccatgaaccgagcacctccctggttccaagccctgggccagactggaacatgtggggccagaacccaggaggatcctgaggagatggaaggcagcaaacaaaatcatgcacaatggtgaagggtgctctccctgacccatggggacccatggtaggacccacgggagggtggcaggatagagggcccatgagccacccccaggcaacagtgacagcaccaaatgctgggagaattaggggtcctggaaactctcatccaggtccgctgggaacatgacatggcacagccacgttggcagcccgttgggcagtggctcacaaagctcgatggacttgaaccacacatccccaaagtgtcacagatattgaacccactgatttgcaaactgacatccacatgaaaccagcatgccaggttcactgcttgactcctcgtcactcacacacggagccttcggggacggccttcaacacggggatggggagagcaaggctggtcctcccttcaaacggaagacccagtgagaaaagggaacgagccggtgatgcccgcacgaacgtgggtggatcctagatgcattttgctgagggacagaagccagacccaataagctaccacagtaggattcccattcctaggccattctggaaaaggccaaaccacagggactgagaagcagtctgggtggccaggggctgacggatcggggagaggctgggtgcataggggccaccctggagacttggaggatgaaggagtcgccccaggaggggctggagcggtggccgggagactctgcacatcggtttggaaccgtggaggaactgtacacccacagactgaactggcgtgtgtgcaaactgaaaaaaaaaatcattcagagtgaaaaggatcaggcaagtcactgtacaactgggctatttgcatgtcacagatgtggattttactgaaacatttcttcaagagtctcaggccctgaagagctcactgcttatctggtgaaacatctgaacctgaaatgggatttgctgttaggctttgtagacaaagtgaaattaacaacatctgcacaaaacaaaccaaagccccctttctctgtttcctaggcagcgggaactactccacatcctcctggcatatgaggagtataacccggtgagtattcccggcagtgaggttcccgggccatatttccatattgacaggagtgggtgtctggtgggggtgtcgttgcttcttttacagttagtatttgtgacccaccaggatataggaggtaggatgtcagctcaccgctggcataaacctccaaggaagggggtggtctcaaggggtcaagctgagacacaaaggagtcagggcctggactcctggtgtcacctgggcctgaccaccacttctcagaacaagaaatgacgccctcctcctggggctgccccaaagcccaggagcttggcagcatcgcacacaggatggtgctatcagcagacattttggacaaggtgctgaagtgcctgatggacttggctcttgtcatgaaatgaatgtgcatcctgaggaagcctctttttcagaggaagcctctccttcagaggaagcctctccagtcacctctgccctctccaatgacatgagtcctcccaggtgacctcagccctcccaggtgatgtccttccatggtgactctggctcttgcaggaggtgggctactgcagggacctgagccacatcgccgccttgttcctcctctatcttcctgaggaggatgcattctgggcactggtgcagctgctggccagtgagaggcactccctgcagggtaagtgaacagctgccccggggacctcctgcagccagacctggggatggccaccctggccaggtgatcacagctttcagccaaggcaccctccttgtgtcgccagcttgttgggagactttaggatgtctctgctgagggtcccacaggagtccacggctgacccccaaagcccaaatcagacgcctctcatccccatcagcagagggcatctcatcctccccgtggccaccctctgtgtcctggagccacgccctccggctctgattctgtgcagctgactctcccctccctgagagtcctcctgccctccagctgcccgggctcctgctgccatcggtgcccacgaatgggccgaccaagcccaggtggcagcatctccccatcccctgttccctggcccgaccccactaccaggagatgaccgggaagcccagcgcccacccagttccggccaccctgtcgtggcctgaaagtcaggcttgccctttttgcaccctggcccaggaggcctccaggggaacctccagccaggctccagggaatgttcccgccccacctccccagggtaaaggccgcatgttggggtcaccagatgggagggtgggaggccttggggtttgggggcctctccagctgcccagctcttgcagctgatggctccacatcttgggggaaggctctgatttcatgatgggctgggggcttctcaggatttcacagcccaaatggcgggaccgtccaggggctccaagaccaacaggagcatgtggtagccacgtcacaacccaagaccatggggcatcaggtgagtttatggtcccctcagctcttcccagaggccctgcctcccgtggggctgtaggagcaggggggctggagcccctcgtggggctggtgactggctgagtcccagccagggcctgacctgggacgtcgggttctccatgggctgggagttggtttcctttcctgccctggaggagacagaggcacagggatgggggcccagctcccgcagagcagggcaaagggcagtgtgtccaccgggagtgtgggaaggtgacagtgttgtggggagctctggacaccgcccagtgttctgcactaggggaagggtcttcagaggccctggaagagggaggtttttagggcagcccagtggcctgagcacctctgttgcttccatcaggacaagaaagatctatgtgggcagtgttccccgttaggctgcctcatccggatattgattgacggggtaaggaggcatagggagaccctggctcagggaccttccttgccctgcagtgccctgcttccccagcccgggggtctggctcactcccagcccacaggaggctcaggcgggtccccaaaggacacacaagcaaaaccctctgcccaaggggggtcatcccagggccatggctggggctcaggcccagcctcatgggcagactgggccaggacccgacttgagagggctcagggaagcctcaagccctgggcaagcccctctctccaggagccacatccccactcaaatgagtgccccccatgaggagcttcaagaccttgtctgacccagcgtcctggagggctcaggcgaccctcatggggaaggtcactgactctggagactgaagccccagtgtgcgcagctcgagccaccagccccagcctggaaggaccaggttctttcacacctgctgtccccacagatctctctcgggctcaccctgcgcctgtgggacgtgtatctggtagaaggcgaacaggcgttgatgccgataacaagaatcgcctttaaggttcagcagagtaagtctacgtgtgcccagcggggcctggggagccctggggtcagaccccgactggcccgagggcagcttcctcacactgtcctcatgatcctctgttctggcccagagggaggtctggccaggtgggctgggcaggacactgtgacaccgagcccatcccccacatgacccagatgaaagtcgagagtgtggtgagcacttccctgtccggatcgccccccagccacagtctcctgtgtgtatctggacacctggggtggccacaaaaggatccggcaccgcccagtaggagactgaagtggccacggggtatgagctgtgaccattcccaggtaactcccctggcctgatatccaccctgtccctagagcgcctcacgaagacgtccaggtgtggcccgtgggcacgtttttgcaaccggttcgttgatacctgggccagggatgaggacactgtgctcaagcatcttagggcctctatgaagaaactaacaagaaagcagggggacctgccacccccaggtgggctccagtgccatgtcccctcccatgtcaccctctggggtagtcagtagtaggggagtgcccgggacccgcaaccctactacctgggccttcctcttcaccttttcttcctcctcttcctcctggactctaagaaagtacaggaggcccaccggtcctcagggcaggcgctcagtgcgtgtatactggacatgctgtgcacgcaggagggggatgtgggcaagaccctccaacaagccccctcccactttccacggtgtctccctctccccctcgcagggccctccaagttactagacgagcccagacccatttgtgggagaccccgcccctccctgcaagcacccacagcctcagagagcagcagaggcccctcactcctgcacgctcctccaaggttgccaggacaagaagcctggagccagggagacaagggaatccgtgtccctgacccacagagcattcagggagagggcccagagccagagccaagagttcagccagaagtgggaacggtcagtcctggcatggactgggcagcccaggagggcagagggtgacccacgtccgggcccaatcacccactgcggagacgggtccccacgtgaggtgacaaggggctgggtgacatccaaggcccctcccacctgagttctgactgggggccgtatcccaggcccaacagccctgggacgaaggtgtgtggcaggaagcccccagccagtctgaaccctgggggcagtcccaggagccacccgccatgccacgacagcttccccacgccaggcagcacgcacccctccctctgggatcagcagactacaggcgtgtcctcggtgtcaggccacgggggccacacagagaccccgaggactccagagacgcaggcaggtggggcccagcccggaaaggcctgcgtgggctcactggagatgctgaccgcgtctgttttcctttcagccaaacccgagcaagggtcgtcggcatccaggcctgtgccggcttcacgtggcgggaagaccctctgcaagggggacaggcaggcccctccaggcccaccagcccggttcccgcggcccatttggtcagcttccccgccacgggcacctcgttcttccacaccctgtcctggtggggctgtccgggaagacacctaccctgtgggcactcagggtgtgcccagcccggccctggctcagggaggacctcagggttcctggagattcctgcagtggaactccatgccccgcctcccaacggacctggacgtagagggcccttggttccgccattatgatttcagacagagctgctgggtccgtgccatatcccaggaggaccagctggccccctgctggcaggctgaacaccctgcggagcgggtgagatcggctttcgctgcacccagcactgattccgaccagggcacccccttcagagctagggacgaacagcagtgtgctcccacctcagggccttgcctctgcggcctccacttggaaagttctcagttccctccaggcttctagaagcatctgggccagggctcatggctggataatttccctaggcttaacaacccaagcaagcttcgcatcctcgttttatttttggttaaacttatgaaaatgtattaagaaagagtgcagctcgagagagattcagagatggaacacaccagaccccagatcacaaagccaaccatgcccggcccctcccagcacccccagccccacgaccatcgttctgaattctgacgacaccgtgagcctgcctttgtacttcaaactcatggaaggataaccaccttcatgttttgaaataaatgtttcctgttgaaatgattttagattttagacagaaatattgaaaaggcactatagtatcctcctataccttccatccagctgcccctaataatgatgttttgcagtcccatggcacataagaaatttaggccgggtgtggtggctcacacctgtaatcccagcaatttgagaggtcgaggcgggaggttcaggttcacttgagtctagaagtctgagaccagcctgggaaacctaggtggacccggtctctagagaaaagtcaaagaaattagccaggcatggtggcgtgtgcctatagtcccacctagtcaggaggctgaggcaggaggattgctggagcccacgagttccaggaagcagtgagccatgattgcaccactgcactccagcctgggtgacagagtgagactttatctcttaaaaaaatttaagaaatttaatgtgggtacagttctattaactaaataataatgtgaactattatctaaggttatgaaggctagaattatcccatttttgcctaacttctcgtacctgtcccaagatcccaccttggactcaccctctgccttcagctcacgtctcttcagcttcctccacatggtccagcaaacacacacctgggctgaatggtagagctgatcgctcatacacaaaggtagaccggtgggcagggattttcagacttacacagtcaatgagttttccttggtgttctggagagcaccgtttgagaaacactttgacagtgaatctaggcctcaagatccatcagctgctctagcttgaattttgctcaagctcagtgaacacctgctctgccgggtgcacgtgaaaggggcaaggatgagaaagctgtagataaagaagacaggacgcagggggtctgtctaagctctatcccctgccttcagcactgagggatgaaatccaactcttagggaacggtggccacgtgctgggccagccccaggctctcaggatctgacagtgggtgacgcagagccaggccttgcccctggggagctctccagcatacacctccctctcccctcccagcgtgccgcaaagcaggcgtcaacgccattgttaatgcacggaggaggaacctgactgttagacctgggttttccagggttgcacggcttctgggagacggatgtgaccctgaggacagggcacaggccagtgtaatgccaggatggaatgagctgtgatctgtgctgtatagaggcctaggccaaggtgggactgacggatgaccaggtcagccgggtcactgaaaacactcttgggtcctcacctgccggttcccaggagtccggaactgccaggagagtggtggcaggtcccccatcctcagctgggtgggcctggatagaacagcaaggcgagggcacatttccctggccattccctccaggcacagccgtgacctgttcattccaaatttgtggaagtatttccacacacacagaactgcaaatagcagtggacgtggtgagaggcgtttgcacatgggataggcaggattttggaggcagagcctccagggcttgccgatgggttagctgcagggcttgagagggaacggagaatccaggatgatgtgttcaaatcggtccattcacctcttccgttccacgcctgtgctgggcactgggagagacagatgcacacaggagccccggccgaggggaggtgtggggggaagcccagagtgtctgggcagggtaggaaacccagagcgtctactgggagctgaaggcttaggtccacctgggtgccgtccaggttctctgcatgtagaagtataggctgagcttcccggaggaggagcagctgctgttgctggtgaccagcacattcaggaacggagactactctgtcaacagacagggggatgacctgaggtctggatggtctagggggtggtagggcccaggaggacccaggaaagggtctcggggatgcagaacatcctatggagggcgtttgggagtcagtgctcaggtcactccgggtcacgcaggtcatttgccggcccctgtcataattattgccatatgagagtgccacctttcctgtgacataatttagacattcctgtgaatggcctacctgtttatatttacaacttcatgtttaaaggaaatttgtatcactctcataaatggaaagccagcaaaacataaattcaatgaaaacaaaatgaagtcaatgaactttagctagatactattccctgaccaaggcctgctggaggccgtacaaccggggtttgaattgagatctgccaagcttctgagtttattctgtttcccccacaccaaggatcctcaatactgcattactgacatcaggggccagacaattctttgcgatgggggctgtcctgcacctggcaggatgtttagcagcttctctggcctccacccactggaagccaggggaatgcagaagaggcttgcttattctcccatttaatgctcaggacaatatctgacatcaatgttacgtcttttattttataaatgaagacaatgagactcagaaaggtttaagtgagtcacctaagaacacacagacagcaagaggtagaacccgaaactgaacacaggtgtccacgagacaacaaaaaagttcaggttccagcttcctttgagtctctcatttcaacaatggccatcgtctgcatacgagctgaagtacaggaaagctgggctgaactctcttcccatcaggcctaggagccccagaccagaaccccagcccaagttctcccagtcaggcccgctggcgtgagctggcatctacactagcatggtttcccaaagctgcagggatgccagtctcgccgctgatgaaggaaatgaagggcatttgcttctcctgcaggctctcgggatttaacacagattccttttcttgctctcttctcccatagcacaaaactgggtggtccatccccctcccagtgtcccaaggctttgttgcgtgttctctttaatttctcccactctcgcagtgcaccctaccctcgtctccctggcaacctttctgctctatcctctcgccacctggatcacaagaacacttgtgagaccccttaacaagctacatcccaaattatcattcccctttgtcctcagccagtgcccgggtccaactcgctctcctggggtgactttctttcctgcccaatatggtttcatcatctgtaaattggggataattgaagtcttgatcctgatattgggctctgaaagcagaagtagcaagctcagccaagtcacttcaacaagaggagacgttccttgtgaaccaaaagggcactggtcacaagggccgctccttctctcaggcctctccagcacgcccttggctcagccaaagaagagactcaggctgtgcttctgtgctgtggggataacgtaggtacctggtccttgaccctgggactttaacagttccctcttgtggctcagttctacagcttcaatgacacaaagtggcttttgctcaaaatagcctttgataggttaaggtactcctctgccactctaagtctgtgtggaacagacagggttttgcttcacagagaagatgcataaaatttggtcttaaaaatgagttcaccatgcacacatacacacgaaaaaagtaaatactgcattactgtatatatgaggttccaaaataggcaaaactaatttatggtgacagaatagtggtgacctctgagggtcagtgttgactgggagagaacagaagagagcctactggggtgctggaaatgttctgtatcttaattttgcaggataattccttggatgcatccctaaaaattcagtcaagctatatagtaagatttgtgcagtttatgtaagtaataggagagataagagggggaacctgtggagaagcagaacatttcaagatctagaaagcaacagttgcaagggtacacagtgttcagacagggaccaaatcatagaaactactagggcttgccatgctgaaatgactgacttcaaaccatagggcatacgtaccttccactgaagaagagcacctgagtaaaatgactagaggtgcatttcaaagattattctatgggaaatataaagaacgaattggaggagtaggaggcaaatagtccaagggacagatacagatctttctttttctttttttttttttttttttgagatagggtctccctctgtcaccctagctggagtgcatttctgcgatcatggctcactgcagcctctacttcctgcgctcatgcaatccttccatctcagcctcccaagtatctgggactccagatgtgcggaccacacctggctaatttttttattttgttgtagtaatgggaatctcactgttgtttcccaggctggtcttgaactcctgaactcaggcaatcttctggccttaacctctcaaagtgctgggattacaggtatgggctacagtgcctggccttattaaaatgttgatgtaataaatgggactacctagtgctgtgctttctccttaaaggagagagctgacagaataaaactagcagtaataatctggtaaattgtgctttctacagagtaaattttgtttgtctcatgacatttatgcaaatattcaaatgtttcaggaatataaacatttaaaatttgggttataaataatgcctcctggctctgaaattatctgaattcatgaagcaatcagtagtaaatatgaaggaaaaatgaaacacagccttatatgcaaggacaaacacaaatttctaattcttgttataatttgggtgcccacctggttttgaaggtgagccttggtctgactggttctgagacatttctctcaaatagcaaatgagtagtgggtatgaatagggtacattggaaagtcatgtcaaaattccatgtaatttttggagcgttttttctcccatatgatttatataatttgacatgtgtattcctatgtaaaatatttaaccacttctctacaataagcattaagtgggctaattagtatgctcttcttattccatatttctgtgatttctcttatctggaacgacttttttatgccacccaggctggagtgcagtggcacatttactgctcactgcagcctcaactccccagggtcaagccatcctcctatttcagcttccctagcagctaggactacaggtgtgcaccactatgccctgctaatttttgtgtttttttgtagagacggggttttgctatgttgccccggctggtcttgaactcctgagctcaagagatccacccaccgcaacctcccaaagtgttgggattacaggcgtgagccactgcactcagcttcttttctaatttgtttttattctgagatcagatgagatcggcatgttcaggttggtatggccatagactgcttttatctattctaataattttgtattgtacaatgtgttggaaaggcaagatgaagttagattatgaagggttcatttccattcaattctgtctatccttctggactttgcctaaatcttaccttctttggagctttcctgaactaacttatctcctttgaattcttacatttggatcctttgtatttgagtatttttacatatatatgtacataaataacacgttttatgtgtagtaatttactctcccaactagattgaaagctgcttgaagagtaacctttttttaaagtcacattggaccgttttaagtacaaatttagcatatgcttgatgattgagagaagaaccatatggttacagtcattggtgtgtctatgattgtgatatgttgctatttaaaaatcaatagttatttcttatttagttttctgttaagccataaccttttgctctcatttatacgtcttctgaacgttaagtaacatgtggctcatatttcaaactcccaatttggaagtttatagcaatgtaactgaagtttataattacaggtctcagaaaactgcactacacagaagttctctatgtgttagaagaatttattagaagatagacaattgtaggttacactgtaatttagaagacttttgcgcatctcatgtatttgtgtcagtttgagaatttgaaaatgcccccaaaatgtctgttcttcactagtgcctcttgtgatcctggcagagataagctaaacttttgaaagggtagactttttctgtttatcttagtatcctgagtccctaaatctggaatgtagtagatgtttgtgcatttccctatgtcagtgaagtcaaaatactagaggtggatttttcagcttttcaaagttttcacatttactaagtccttcacagttatcgcctactagttaaaaaactatttgcctcaatttaggccagtgctactttgacatttgcattgctgtaaaacccttactaaaaggtatatttttctggtatataaatacatgtatgcagcttttctcatatctttgagaaagcaaaaaattgtactaaattatgatttccactgtaataggattatggcttagtcatgatcagtattatgttttcagctatgtcttactaggattattgtaaaagactttcaaaatagttcatgtgaatctttgtctgatcttcacaaactcgggtatgtacatagctctcccccaccttctcctggctttggcaatttattttatttttatggtggttatatatatatatatataaaacataccatttaccatttgaactattttaaaaagtgtacaattagtggcatgaagtacattcacaatattgtataaccatcaccactgtccatttccagaacttgttcatcatcccaaacagaaattctctatcccttttcttccccagcccctggtaacctctattctactttctctttttatgaatttgcctattctagacacttcatggaaatagaatcaaacaatatttgacctttcttatttcacttaggataatgttttcaaggtttatccatgttgtagtacatagcagaatttaatttctttttttgactgaataatttgtatatactacatcttgtttatacatccatctgttgatgggacatatttgggttgtttccaccttttggctattgtgaataatgttgctgtgaacactggtgtgcaaatatctatctgagtcctgctttcacttcttttggatataaacctaggaatggaattgctgggtcatatggtaattctgtatttaaccttttaaggaacagctaacctggtttccacggcttctgtaccattttatatttctaccagcaatgcacaagtgctccttccattttctccatatctacccaatacttgttattttctgttttctttcaattaataaccatcctaatgggtgtgacatagtattgtcattttgatttttagcttcctaatggctagtgctaatgagcatttttttatgtgctattggtcatttgtatgtcttctttggagaaatgtctgttcaatcctttgcccatttttgaattgagatgtgcgcttttttgttgttgagttgtagttctgtagttctttatacattctggatattattctcacatcagatatatgatttacaaatattttctcccaaatacttctgtgggttacagatatattaatatctgtagattgtctttcatggtcttgataggatcttttaatgcccaaaagtttctaattttgatgaaataatgtatgtagttttgaacttaaacaatgttacagattgcgcaaaggatataaccatgaaattctgatggagtgaccccacagctgcagaaaaccagaaagaaccctactctaaaacccaaaagacttccctagatagagtccttcgaaaataattttctaaattattcacacagcctgtggataaattaagaggaaatgatatctgtaacagtgctgcttgtgatgaaaacacagaagagtcaattatattatcaaatcttagctggaatggaaaatcaggaggatatttattagcaaacattaataaaaggttggcctttattattgtaagcatgtacacagacgacagcatgtagtctctaccataagaatgagaaatgcctcctatctttatgcattctgaaatttaacctttcttaacccaattgctgtaagggcctagggtttatttgttatgtgtgttattggagtagagactgtttgaaggttaagggggtatttagtgatgcaagtgacatttatatgttttaaaatcttctgcttttctaggcactttttaaaatgaaatgctatatttttaaacttttaaaaattatttttattattttttgcagagatgaggtcttgctgtgttgcccaagctgttctcaaactcttggcctcaagagatcctcctgccttggcctcccaaagtgctgggattacaggcgtgaaccacgtgcctggcccaaactttttaaagactttatttctggaggcaggttctcaaaagatatcctatcttaatgggcatatatagagagagagtagtaggtgagtttaagggggatgtaaatattggccgaaagaggtttcttttaggtatataacccctcaaatgtagccctttggatatcaaaagtttattatggcaatgttctttgtgcatttttattcgatgttgtcagccattcatctaataactcttcagaagattttgtctctgggcagtggcattttataacttcctatatggaagaaaacttttatccaactgataactgatatgccaatgtgttagtatgaaaaaattttcccaacattcttaccaggtgtggtggctcaacctgtaatcccagcactttgggaggtggagtcgggcggatcacttgaagtcaggagttcgagaccagcctggccaacatggtgaaaccctgtctactaaaaatacaaaaattagctgggcgtgatggcaggcacctgtaatcccagctacctgggaggctaaggcaggagaattgcttgaatctgggaggtggaggttgcaatgagccaagatttcctcactgcactctagcctgagcgacagagtgagactctgtctcaaaaaaaaaagaaaaggaaaaaaaaagaaaatttcccaaaattcaaatgtcgtttcactgcgtggctttgtttgattattaatactttaatactgtgtttaaaattaatatttattatttttaaaaatcagcttccttaggtcgaagaaacattaatgtttaatattaagctattattgtagcttagtgtagttataataagatactggaactcatggaaggggttagattttcttcatcttagaaaccgttacttttcataaaatatatattgtgcaattatatataaaattatataataattagatatacaaataaaaaatcggattatagttgggctcagtggctcgcatttgtaatctcagctccttgggaagcttagactggaggatttcttgagtccagaaatttgaggctgcagtgagccatgattgtgccactgcattccagcctgggcgacaggaatgagaccccgtctctaaaaataaaaactaaaaaaaaatagattatgattggcaaaagattgagtgacagtgaaaatgcaatgaatattttgactactattttttgattacatacataggaagatacgaatttttctgtctttccaaattagtttagaaattaaagatttggccgggcatagtggctcacccctgtaatctgagcactttgggaggctgagataggcagatcacctgaggtcaagagtttgagaccaccctggccaacatggtgaaacctcgtctctactaaaaatacaataaaaattagctgggcatggtggcatgcacctgtagtcccagctacttggggagactgaggcaggagaatcacttgaactcaggaggcggaggttgcagtgagccaagatcgtgccactgcactccagcctgggcgacagagcgagactctgtctcaaaaacaaacaaacaacaacaaaacaccagaaaaaggaaaaatagtgttaagagataacttagtatgtactgtttgtacacttcatgggtgtgcatatatgacgtgtttggttttatagtgaaaattctaacattctgctgtatggtttatggtgccttgtagacgttcctttaagcactcaatgataaagattaaaattactaagatagagagtaaatctatgttatatgtagtcatttctcagtttgcatagtagtatgggactgtaaaaatgaccatgcaagctaagactattcaaagggatcatagtaatcagtggaaaaaattgtgattgttctgttggacctttaaaaatttttgtcaaaacattaaaaactctctcacagttggttatagatatacagggtaagaagaagcgtggtatccacagagaaggagggagcttcataaacaaagacaaacaggaatatcaactaccagccaccaacagcactcttgtaaaacttatttaaatattacaaaaaacaatatacaagattactaagagattggaagataaagggagaaaatttcactaatgatctcatcaccaaacacagttaattatttgctgttactcttttatcaaattagtgtttagtattgttttaatcataatgtacatacaattttgtatcttgctttttctgagatgtctgtttctgtccatgttatacatacctatacagtcctgtgctgcatgatgatgttttggttaacgatggactgcatacacaactgtgatcccataagataatagtagagctgaaaaattcctattgcctagtgacattgtagccatttacttgtttttgctttctgctttttttatgtagtcatttactatactaaacctttaatcattattttagagtatactcctatttatttagaaaggtcccccaagggaggacagaaaacactcataatttaatgttattgtccttttcacacatatgtagctatatctattatattttattttactttattttattttaatttttgagacagagtttcactctgtcacccaggctggagtgcaatggtgcagtctcagctcactgtgacctccacctcccaggttcaagcaattcttctgcctcagcctcccgagtagctgggattacagatgtgcaccaccatgcctagctaatttttgtatttttagtacagacgaggtttcaccatgttggccaggctggtcttgaactcctgacctcaggtgatccacctgccccagcctcccaaagtgccgggattacagcacttttacagcatgagctgccatgcccagcctattttattttattttgttttattttattagagacagtcttgctctgtccccaagcctggagtgcagtggcgtgatcgtagctcacttggctaatttttaaactttttgtagatatggggtctgggtatgttgcccagcctgatcttgaactcctaggcttaagtgatcctcctgccctgacctcccaaagtgctgggattacaggcgtgagccatcctgcccagcctgtatctattatataagctggtttttttgattactttaatgtaaatgagattataccatactctcttctctgtcacttcctattttcatgtaatttatgttagacatctgtcaatgtcagtataaataggtctagatcattttttatagttgtatacctttcgttacatggatgtttcacaatttacttagctaactacctattgttggacatttggttatttccaaatttttgctgttttatataatgctgcgcttatataaaatatagttctatataattatgtttaattatgtactaccgctgtatctgacaactgacttgtatcaagaacatacaaagaactgttacaagttgccaggcagagtggctcatgtctgcaatcccagggctttgggaggccaaggtgggcggatctcttgagcccaggagttggagaccagaccccgtctcgacaaaaatacaaaaattagccaggcataggggcacacatctgtagttccagctacttagaggctgaggtgggaagactgcttgagcccaggaagttgaggctgcagtgagccaagatgacaccacggcactccagccagcgcgtcaaaggccctgtctcaaaaaaaaggaagaagcaggggcggcaaataagtagagtataagccacctcatccaactttattggaaccagtagttgactggttaatcagtccaagcaaggaagcataaaaactgatgcatgtgccgggcatggtggctcacgcccgcaatccccgcactttgtgagaccgaggcgggccgatcacctgaggttaggagttcgagaccagcctggccaacatggtgaaaccctgtctctactaaaaatacaaaagttagccatgcatggtagtacacgtctgtaatcccagctactcaggaggctgaggcaaaaaaaggagaagaaatgctatgtgaagcctttttataagcacattaatttcattcacgagggcagagcactcatgacctaatcaccaccttgaaagcctcacttcttaacatcatcacattaggtcttaggttataacatgaattttggaggactccagaaaaaaaaagtgaaagacaacccacagaatgggagaaaatacttgcaaattatgtacaaagtaggctcactttatttgtggaaaatatgtagccagacacagtggctcatgcctgtaatcccagaactttggaaagctgaggtgggaggatcacttgagcccaggagctcaagactaacctgggcaacatagggataccctatctctacaataaataaataaaattacccagatgtggtgacatgtgcctgtggtcccagctacttgggaggttgaggtgggagaatcacgtgaccccaggaggttgaggctgcagtgagccaagataacattaatgtatcccagcctgggcgatagaccgagaccttatctcaaaaaaaaaaaaaaaatatatatatatatatatatgtatatatttatctatctacctatatattcatatatagatatagattaatatagatatataaacatatatttatagatatatagacacataaatatatagctatatataaatatatatttataaatatatagatatatatgtaacaaaatatgttccaagacctccagtgtatacctgaaactgcagatagtaccaaactctatatgtactatgtttttttcctatacatacatacatacctatgatgaagtttaatttataaattaggcactgtaatagaataacaacaataactaataataaaagagaacaattagaatatactttttgtttttgagatggagtcttgctctgtcacccaggctggagtgccatggcgccatctcggctcactgcaacttccacctcccaggttcaagcgattctcctgcctcagcctcccgagtagctgggcctacaggcacctgccaccacgcccggctaatttttgtatctttagtagaggcagggtttcaccatattggccaggctggtctccaattcctgaccttgtgatccacccacctcggcctcccaaagtgctgggattacaggtgtgagccactgtgcctggctagaatatactttaacataagttacatgaatagttttctctgtctcaaaatactgtaatatttgggattgcagctgcccgcaggtaactgaaactgcagagagcatacgggagactacagtatctgacaatggacttggatctagaatacataaagaactcttacaacttgataataaaaaggatataacccaattttaaaatggacaaaagatctgaacagatatttctccaaagaagacatacaaatggccaataagggccaggtggtggcttatgcctataatcccaacactttgggaggccaaggcaggtggatcacttgaggccagaagttcaagaccagtctggccaacatggcgaaaacccatctctactaaaaatataaaaatcagccaggcgttgtggcgcatgcctgtagtcccaggtactcaggcagatgaggcacaagaatcactcgaacccgggaggcagaggttgcaatgagctaagattgcaccactgcactccagcctgggcaacagagcaaaaccccacctaaaaataaataaataaataaaaataaaagaaagaaaataaatggccaataagcacaagaaaatacactcaatttctgtcttagtctgtttgtgccgctgtaacaaaatacctgagactaagtaatttataagtaaaaaaatttattcctcacggttccggaggctgggaaatccaaaatcaaggtgatagcacatttggcatttggtgagggcctgttccattgttcccgttctcgcagtggcatcttcacatggcaggagaagaaaggaaaaaagaagaagaaatgttatgtgaagcctttttataagggcattaatttcattcacgagggcagagccctcatgacctaatcaccaccttgaaggcctcacttcttaacatcgtcacattaggtcttaggttataacatgaattttggaggactccaacattcaaaccatagaaacatcattagccatcggggaagtgcaaatccaaaccatgttaagataccacttcacactcacaagaatggctataataaacagacacataataacaagtgttggagaaaatgtggaaaaattgaaacactcacatgttgctggagggaatgtaaaatgctttgcaatgaagttggaactgctttggaaatagtctggcagttcctccaaagcttaaacatagagttatcatatgacctggcaatgccaggcttcatcatattcccaagggaaaggaaaacatatgtccacacaaaaacttacacatgaatgttcatagcagcattattcataatagtcaaaaagtggagacagctgggtgtggtgtctcccaacactttgggaggccaaggcgggaggattgcttgaggtcaggagttcgagaccagcctggccaacagagtgaaatccgatctctactgaaaatacaaaaatcagcgggacatggtatacgtgcctgtaatcccagctacttgggaggctgaggcaggtgaatggcttgaatccaggaggcggaggccgcagtgagccaagatcacaccaccgtactccagcctgagtgacagactgagactccatctcaaaaaaaaaaaaaaaaaaagtgataaacagataaatgaaatgtgttatattcctacaacagaatattattgagccataaaaaaaaaggaaataagtactgacacatgctataacatgaatgaaccttgaaaacattaggttacttgaaaaaagccagtcacaaaagatcacaaattgtatggttccatttatatgaaatgtccaaataggcaaatcctatcctaaaagaaagtaaattagtggttgcctaggactgagggctggaggaaatggggagtgactgctcataggtatggtatttttttttgagagaaatgaaaatattctaaaattgattgtggtggccaggcacaggggctcacgcctgtaatcccagcactttgagaggccgaggcgggcggatcacctgaggtcgggagttcgagactagcctgaccaacatggagaaaccccgtctctactaaaaatacaaaattagccgggcatggtggtgcatacctgtaatcccagctactcgggaggctgaggcaggagaatcgcttgaaccagggaggtggaggttgcagtgagctgagatcgtgccactgcactccagtctggcgagagagtgaggctccatctcataaaaaaaaaaaaaaaaagaaagaaagaaaaaagaaaaaaaagaatgtttcaggcaaagggaagagaagtgcaatggtgctatttcaggcagaagcttgtcaggtttgctgtggtgtggtagtgtggaaggactcagtgggaaggaaaagaaatgagggcacagtagtgggcagggccaagataaagccatacgcatactgctacattttttccttgtccaatatatttcattaaatgtagacaaaacttattataaagacataacttttgatgtttgtaaggtcatctgttatttgcactccttttttttttgagatagggtctcactctgtcacccaggctggagtgcagtgttgccaccacagctcacagcagcctcgacctcctgggctcaagcactcctcccaccttagcctcctgagtatctgggactacaggcacatgccaccgtgccccactaattttttattttttgtaaagacagggtttctccatgttacccaggctggtctcaaactcttgagctcaaacaatctacccaccttggtctcccaaagagctaagattacaggcgtgagccactgtgcctggcttgttatttgcatttgtgattttaaaattccatgttttttatcataagattgtcaggtgctttctggacaggaaatgccttaatttatgactcaaaatacaaacaagtgtaggtgatcaaatgcatatctatgtcttcaatggaaatatatatacatacaagtcattaacgaagacaaatgagaacatgaaattcatgacctattttcctttccatcacctagccccctaaaggagagatctttttcattcagagccctgggttttgttttgtttcatgatttgcttttttttttttaaaaataagagtttatttatttatttatttgagacaaggtttcactcccatcagccaggctggagtgcaatggcgtgatctcagttcactgcaacttctgcctcctggactcaagtgactctcttgcctcagcctcctgagtagctgggactacaggcacgtgccgctgcatccagctaattttttgtagagacagggtttcaccgtgttggccaggctggtcttgaactcctgagttcaagcgatccgtctgcctctgagtctcaaagtgctagggttacaggaatgagccgccgcgtggccaaaagagtttattttttaaagaaaattgacttctttgaaaacgtagaaatgaggccgggcgcagtggctcacacctgtaattccagcactttgtgaggccgaggcaggtagatcgcttgaactgaagagtttgagaccaatctggccaacatggtgaaaccccatctctactaaaaatacaaacattagccgggtgtggtggcaggtgcctgtaatcccagctactcgggaggctgaggcaggagaatcgcttgaacccgggaggcggaggttgcagtgagccaagattgcgccattgcactccagcctgggcaacaagagcaaaactccatctcaaaaagaaaagaaaaagtagaaatgaggaagcggccagcctgtgtggggatctaatcaaacaaatcttcccctgatgagggtagcacttaagttgaaaaaaatttgcctatataataaatattgcaatactttatttatttatttatttatttatttttcgagatgagggtctcgctgtgttgcccaggctagtcttgaactcttgggctcaagggcttctcctgcctcagcctccccagtggctgggctaataggcacacaccaccatgcccagctctacatactgattttttttttttgagatggagtcttcgctctgtcgcccaggctggagtgcagtggcgcgatctccgctcactgcaagctccgcctcccgcgttcacgccattctcctgcctcagcctcccgagtagctgggactacaggcgcctgccactgcgcccactaattttttgtatttttagtagagacggggtttcaccgtgttaaccaggatggtctcgctctgctgacctcgtgatccgcccgcctcgacctcccaaggtgctgggattacaggcgtgagccaccgcgcccggcccatactgattttgaaatttaaaaaatctacattctatattcgcatcatagcttctccctaataaaatctttgtgagtgtttatgggacttattccccgaaaaatctgcaagcagcctggtagctttatatacacaggaaagccaaaggacaaactaggaattacctcagagatggggaaagactaaggatcttacccaaatcagttgagaatcagccttaagtataaatgggccaggtgttggtggctcacacctgtaatcctagcactttgggaggccaaggcgggcagatcacttgaggtcaggagttcgagaccaccctggccaacatggtgaaaccccgtctctactaaaagtaccaaaattagccaggcgtggtggcacgtgcctgtggtcccagctacttgggaggctgaggcaggagaatcgcttgaacctgggaggcagaggttgcagtgagctgagatcacgccactgcactccagcctgggtgacagagtaagactccgtctcaaaaaaaaaaaaaaaagtataaatgaagcacaattaacatttgttaattttataaagcaaaagttcataaaaataaatattctaattaactctcctacatcttataaacactattaccaaacccatttaagattgaagataaattatatcatggcatgggtaaagattttcaataaggagttgctaggataaaagtcaaaattctccagcataaattcactgacagggatttctgtttaatcttttcaaaattctaatacccaatttgtttcctctagagaataactcgtgtaacatcataacctctttggtggaccttgatttttccatctgtaaaagtatagaactagttttgacttaacagtcaacaaatgcctaccctctccacatctagctgattagagcgccctcatgtgcgcatttgctgtaatgttttagaaatctgaaaaagacaatattaatctcagcagtaatacaataaataatgtcttcatttgcacatttatagcaaatgctataaatatatagctccaagtattactcagtaaaagctaaaggcaaatgctgtagtaggttaatcttactgtcgttcactatcaaacctttcatatgccaattttatcctaaaacagtgaagttattgttttggtttcaattttaatttaatgacttaaaggattttttcccttaaaacttctaagtatttcattataatattatttcatcattaggcttaaaggaaaatatgtggtcaattgagttgttatttattatacatgatagcttgacatcatctttttagggatggaaaacagctccagggaccaagtctaactcagttttttgatataagaatttacctgtcggccgggcgcaatggctcacacctgtaatcccagcactttgggaggccgaggcgggcggatataggtcagcagatcaagaccaggagttcaagaccagcctggccaagatggtgaaaccccatctgtactaaaactacaaaaattagccaggcgtgatggcaggcacctgtaatcccacctacttgggaggctgaggcaggagaatcacttgaacccggttcaagtgagccggctgcagtgagccaagatcacgccactgcactccagcctgggcaataagagcaagactccatctcaaaaaaaaaaaaaaaaaaagaatttactagtttgaatcataacaatttcttcctactcaaagagactacattggaggaagccaaaacagaagcttatttatttatttatatactttatttatttatttttgagacagagtcttgctctgtcacccaggctggagtacagtggtgtgatcttggctcactgcaacatctgcctcccgggttcaagcgattctcctgcctcagcctccctagtagctgggattacaggtgtgtgccaccacggccagctaatttttgtatttttagtagagacgggttttcaccatgttggccaggctggtctcaaactcctgacctcaggtgatccacctgcctcagcctcccaaagtgctgggattacaggcatgagccaccaagcccagcttagagaagcttattttttaaaagaaaatacacaaaaaaatcaaaatctcataagtccaattgtaatttttttttggcttttaaaaattgttaatgccctcaaatattctcctatccaatcactgtattttaaatggcattcctccagcaaatatttgttgagcccccactatgtgccaggattgaaatgtcaaattgaaggaggcaatagctactgaagtaaagcaaaaaaaagtactggttatttttccttctataaaatgacctagtaataaccgctttacccaggagagttgctgtaaagatctaataacatgacacatataaccacacccctaaagaatgaggtgttactgcatgttctcactcataggtgggaattgaacaatgagaacacatggacacaggaaggggaacatcacactctggggactgttgcggggtgtggggaggggggagggatagcattaggagatatacctaatgctaaatgacgagttaatgggtgcagcacaccagcatggcacatgtatacatatgtaactaacctgcacattgtgcacatgtaccctacaacttaaagtgtaataataataaaataataaaataaaaaaaagaaattttgcttaaataaatattataataaaaaaaacaaatgaggtgttattaaaatgtttgcaagagaaaccctagtaattccaaacacatattttaggaatggtttcttgtgtagaaaatcctggaatgtgaggctctgctgatttttttaatgcatattctcttcttatgtatgcggaattttttttttttttgagatagagccttgctctgttgcccaggctggaatgcactggcacgatcttggctcactgcaactgccacctcctggtttcaagtgattctcctgcctcagcctcccgagtagatggaattacaggcgtgtgccaccgcacttggctaatatttgtatttttagtagagatggggtttcaccatattggccaggctgttctagaactcctgaccttgtgatccacccacttcagcctcccaaagtgctgggattacaggcatgagccactgcacctggcctatttttgtttttactaatgtttcaagagacccactttatgtacagaattctggctacaacctaacaaatgagttgctctgttcatcagttatagccaatttaagtaattatgaaaagctcaacaatacttttaactggcaatgaaagcgtcaatagctcacatttaccaccacaacttaggatttcttggtagctaaataaaatgcttctattttgtggggggaaactgtcacataagttgaaattctgcaatgttcaattgatgaaaaggtctctatgttaaatcaaaggtataaattccacatcagtagtacatgaaagagaaaaaaaaagccaaaattaaagtgattcatgcccacttccctgagtgaacctaagattttactaacagagatgccgtaactttgatcatgcacacatccaacttgaatttaaaaacatgcatgcactcactcatcttttatctcttatgtaattaatactgtaagattatattttgcctacgtgctctatattactaatttataggattattactattcagtgttgtttacttgaaaccatactgtactatacacaacttttgcattccatgctaactttatttttttaattattttttttttatacagagtctcactcactctattgcccaggctggagtgcagtggcacgatcttggctcctgcaacctctgcctctcgggttcaagtcattctcctacctcagcctcccaagtagttggtaccacaggtacatgccaccacacccggctaatttttgtatttttggtagagatggggtttcaccatgtgggccaggctggtctcgaactcctgacctcaaggttataggcctgagccaccatgtcccagctccatgctaactttagagcttatttcccatcccataagatacaacactacttgtgttatatagtgagcagtgtggggaagaaaagcatagaattaagttagtgacaaatccagtgaactcaaaaagagggaaaaaaacactcccaaacaattgttttccccatattctattctccctagaggtattccatacaggaacgaaaaaagaaaaaaaaggatacaaaatgagaaagatgttcatgtgacatataagtacagtaataaaatcaacaagcatatatggtatttaagcaaaatagtatgtatgcattgatggtcatctgatataaatccatcatttctgttggccaacatctaaaacctttacttttctgaggagacaagctataaatctatacggatatttctacaacgagaattcactattacatatgaaccaatataatttgatgtcaaatattcacaattaggtttaaaaaatcccctacttggccgggcgcagtggctcatgcctgtaatcccagcactttgggaggccaaggcgggtggatcatgaggtcaagaaatcaagaccatcctggccaacatggtgaagccctgtctctactaaaaatacaaaaattaactgggcgtggtggcaggcgcctgtagtcccagctactcaggaggctgaggcaggagaatcacttgaacccaggaggcagaggttgcagtgagctgagatcgcgccactgcaccccagcctgacgacagagtgagactcagtctcaaaaaaaaaaaaaaaaaaatcccctacttatgttaagagtaccaaaaatagggccaggaatgatggctcatgcctataattttggcactttgggaagccgaggtgggaagatagcttgagtccaggagtaaaatagtgagactctgtctctacaaaaaaataaaaaattagctggatggggcacacacctgtagtccaggtactcacgaggctgaaatgggtggatcacttgagcctgggaggtcaaggctgtagtgaactgtgatcacaccactacaccctacacccagcctgggctacaaggtgagaccctgtctcaaaaaaaaaaaaaaaaaaaaaggtaccaaaaatctatagctgtttcagaaataaaatacatgtagttagtgaggtttttctctcccactgctatgacttaatttttggttgagatgctaagccaaacatcattttaagtctgtggcccaaccaaaaaagggaatcatactctccaaagaattgtacattcccactctaattgctaaaataaaatgttggattatgaaaatcaattttgtaggtatcaataagttataagagcatggcttatttaaaaaaaaaagtgggccaggttacctacatgagctgcaaagcaagcaaactgaattttcttatcgaagagcccatcctcatacttaaaatttcccatgactacatggaaattctttcacttaccaaaaacacctgattggcactttcactgagagttgtgtcatctgggctgtcgacaggtgtctgacgtgtaaacttggaatcaaactgacttacatcctcttcagattgctctacacaaacaaaataatttagaaaataatgaatagtccatatgacatcaatcaaatgcactgtaagctctgggagctcttttcgcaggggtgaactataataaagtattagaatagtcttagcaggcactattctaatagtggagaaatgcaagtggaagaaaaaaatgcaagtggaaagtactgagtcaaattacatcttcaaatcttaaacatgcactaaaaaagattttagtatactgttattcctattaaaaatgtgaatatattggctgggcatggtggctcaggcctgtaatcccagcactttgggaggctgaggcaggcagatcatgaggtcaggagttcaagaccagcctggccaataaagcgaaaccccgtctctactaaaaatacaaaacatcagccgggcgtggtggcgggcgcctgtaatcctagctactcgggaggctgaggcaggagaattgcttgaacctgggaggcagaggttgccgcaagcagagatcgtgccactgcacaccagcccaggtgacggtgcgagagtctgtctcaatgaaaaaaaaaaaaaaaaaagaatatatcgagctcaaaacaagctggaaaaaatgtgaatatcaatttcccctctcacaaagcttcagtgtgcctagtccactggctaaatccctgtttagagataattaattcagttggctactgcaggtttgtaataaacctgaaaaactactgaagcagagttaaaacatgaataatactggtaagatgctccagttaaagtttcttcccacagctcatttcattccttcagaaatctaaaggagcaaaaataattttctattccgcatgggttataagttatatttccttgtgaaagtatagttatcacttcagttctaaccatgagatttatttatttaattccttctctctttcccaaaatatctggttaaactcttgggccaaatgtaagaagtaaataataatttagaatatctgacttaatactaaaagatgatgaccacattgaccttataattctcttagagcccagactgtgaacctgcactccctggaggaatggctgattccaagtgtggggaaaatgtacaagataagcatagaacaccagtttccttattttgctctctcgtacaacaccagacaatgtgctcatgtcaaaaggactcagaacccaacatgaagatgcacccagcattcactgcacccagcattcaacgaagggaaaaaacgagcaccaataaaaataactgctaggtgcggtggctcacgcctatcatcccaacactttgggaggcagaggcaggtggattgcttttgagctcaggatttgaagaccagcctggtgaacacggcaaaaccccgtctctaccagaaacacaaaaattagctgggcatgatggtgtacctgtggtcccagctactcaagagggtgaggtgggaggattgctggaggtcgggacgtcaagcctgcagtgggcagcgatcataccactgcactacagcttgggtgacagagttaagaccctgcctcaaaacaataaatgaataaataaaaataaaataaaaataactgcgatgaaaggaaacacaaatatgttaaaacgtgtaagttcataatatactaaaaaagaaaaaaacacacacaaagttcattggtcaattttggaagatgctagggaactaattcattattttgaaaactaggaaagaatcaaacatacatcctgccttttctgtatgaactgtaccttgggtaactaactgatcaaagagtttctctttatgaaagaattccagctaacaaagaaagaagaaataacagttagaataaaaccatttcacaaacacctgatgaaactacaaaagtaggccagagtttctcaacctcagggctactgacattttaggcctattaatactttgcgttagggggctgtgctgtgctgtgctgactcttacccctgaaggtacctatagcattccctctcccaagctgtgacaatcagtgtgtctccagacattgccaaattaccctggtagtgaaatgctgacacaggcagtgaccactaacatcactaaaaaaacacacatatgcacacacaagtacacattatgcctcctgatcaaagcatatgcgatactgagagtgtaatctgaatcagatcaaccacctaaatttaactaccagtttttggaaatttggggaacagatgaacatggtcaatgacactctggggataatatcagcaaaatcaaaatttgagaattctacaggacaaatgaccccgtttcttcagtaaatcacgaggggaatctataaacgaaaagagacctaagagacatagtaaccaaactacatacagaccttgattaaatccttacaaacaggagaaaaaaaaaaaaagaatggaacaacaacaacaaaaaaattaggtggggcaacacagggagacctcatctctagaaaaattcaaaaaattggatgtggtgatgcacccctgtggtcccagctatatgggaggatcccttgagcctgggaagatgaggctgccatgagccactatcatgccgctgcactccagcctgggcaacagagaaagaccctatctcaaaaaaaaaagagaaaaaaaaaactggggaaactgtcaacttcttaggtgtgatgatgggatgacagttatgtttaaagaagatgatctaattatttttaagctgggcagtaggtgtatgacagttctcctccttacaattgtttgttgttttttaaagtgggtcacattatggggcatgaccaaaaaataatcaccatcatcatcctcctccttctccacctacagcccaaggaatggaaaaagaaactgttttctcagattctgaggtggcagaaagacaataacacactaactcatttactcataaacatattgttatggattgaatcgtgtcccttacccaccccccagaaaatttcgtatgttgaaactctaacctctagttcctcagaatgtgaccttatttggaaagggttattgcagatgtaattagtgaagatgaggtcctactggagtagagaggaaccctaatccaatatgcctggtatccttataaaaaggggaaatttgtccacagatatgcacacaggtagaacaccatgtgaacatgaaggcagagatccaggtgatgcacctacaagccaaagtatgccaaagatgagcagcaaaccaccagaagccaggggagaggcatggaacataaggtttctcacagttgtcgaagaaaccaactctaacaacgtgatctagaacttctagtctccagatctatgagataataaatttctgttgtctaagccacccagtttgtggtactttgttgcagcaagcctagcaaactaatgcacacatattctatattttgaagaaaaaattcccagagaatcatatttaaaatggttaaattaagcaaaataaaacaaaccaaaaaaagaaaagtcccaactacctgaaatatttaattgtcttaggaaactgacttaaaaatatctaatacaggccgggcgcggtggctcacgcctgtaatcccagcactttgggaggccgaggtgggtggatcacaaggtcaggagttcaagaccagcccggccaagatgatgaaatcctgtgtctactaaaaatacaaaaatttgctgggcatggtggcaggtgtctgtaatcccagctactcaggaggcagaggcagagatttgcttgaacccaggaggtggaggctgcagtgatccgagatcacaccactgcactccagcctgggggacagatcaagactccgtctcaaaaataaaaaaataaaaataaagaggaagaacgctatggaatttgactagaattagggctaacaatatgaagcactttgggaagccaaggcaggtggatcaccatgtcggccaggagtttgagaccagcctggccaacatggtgaaacctcatctttactaaaaatacaagaattagccaggtatggtggtgagcacctgtactcccagttactccagaggctgaggcacgagaatcactggaacccgggaagcagaggttgcagtgagctgaggcagcctggtgtccaagctgtggtgagccatgatcataccactgcactcaagtctgggcaacagaggaagtccctgtctcaaaaaaaaaaaaaaaaaaaaaagggccaggtgcagtggctcacacctgcaatcccagcattttaggaggctgaggcgggcagatcatgaggtcaggagttgaagaccagcctggccaacatagtgaaaccccatccctactaaaaatacaaaaatcagccgagtgtggtggcatgtacctgtaatcccagctactcaggaggttgaggcagaagaattgctcgaacctgggaggcggaggttgcagtgagccaagaccacatcattgcactccagcctgggcaacagagtgaacctccatctcaaaaaaaaaaaaaaaaaaatttaaaaagggagtatagggccagccacggtggctcacgcctgtaatcccagcactttgggaggctgaggtggctggatcacggggtcaagagatcaagaccatcctggccaacatggtgagaccccatctctactaaaaatacaaaaaattagctggacacagtggcaaatgactgtagtcccagctactctggaggctgagacaggaggatcgcctgaacctgggaggcagaagttgcagtgagctgagaccataccactgcactccggcctggtgacaaagcgagacttcgtctcaaaaaaaaaaaaaaaaaaaaaagagtttaaaaaaatctttacagaagaatgacaatatagaaaaaatacagaaaaaatagaaaagtctccaatttctaatcactatagtaatatttgatttgggcaagaagcaatccagatgaaaccattaagtaaagattattatgggacagaatattcacactgtttctatcatgccatagatcacttgttaattacaaaaggaaaaagaggctgagaatggagtctcacgtctgtaatcccaacactttgggaggccaaggagggcggatcaccttaggtaaggagtttgagaccagactggccaacatggcaaaaccccatctctactataattacaaaacttaggcaggcatggtagcaggcacctgtaatcccagctacttggggggctgaggcaggagaatcgcttgaacccaggaggtggaggttgcagtcagccaagattgcaccactgcaccccagcctgggtgacagagtgagactccttctcaaaaaaaaaaaaaaaaaatgcccttattcttaggagatgtatagaagaaattaggggtgaagtgctatgaaatctgcagttaactctcaaattgtacagaaagaaaatttattaatgttaaaaaaagtcaatattcatagatacacatatatgtgggggcaggtagaaagggagggacacagagacaaagaaaatatggcaaaatggtaacacctggtgatcactgaactattcttgcaactctcaaaagtttaaaaaatttcaaaggtatattgtttttgaactgctcgggaggtttaaatttttgaatttttaaaataagcaatcaattgtgaggaagtctgagaagccacagacttaagagataagatgaaaaataaggaaagtagaatcacagtaataagaggaacagagtttcaaaatgctgtggtcagtcagtagcttcaatgcaaaagaaagttaaattaaggaccaactcagtaaagacaactggattcagcaactgggaagtcagtgatgacctagggtacaggagctgcactgaaatagtagagttgggccacgcgtggcccacatctataatccagcagtttgggaggccgaggtaggtggacctcttgaggccaggaattcaagaccagcctagccaacatggtgaaaccccatctctactaaaaatacaaaaattaacccgagacagtggcgcacccctgtaatcccagctactcaggggcctgaggcatgagaactgcttgaacctggaaggcagaggctgcagtgagctgagatagggccactgcacttcagcctgagtgacaggggaagactctgtctaaaaaaacaaaaaataggcctggcgtggtggctcatgcctgtaatcccagcactttgggaggccgaggcaggcggatcacgaggtcaggagatcgagaccatcctggctaacacggtgaaaccctgtctctactaaaaatacaaaaaattagctgggcgtggtggcaggcgcctgtggtcccagctcctccagaggctgaggcaggagaatgacatgaacccgggaggtggaggttgcagtgagctgagattacgccactgcactccagcctgcgtgacaaagccagactccctctcaaaaaaaaaaaaaaaaaaaaaaaaaaaagacgtaaactgggtatgtgcctttagaggtggtgcacatttttagcattataaatgaatataaatgagtggcaattgttactttggtgcacagatttttggtatcttaactagtttttggtctcttccactaaaggcattgcctgttgaaccttgttaggaatgtaagtactgaaggcaaactgcctgggtttgaattttgttctgtcccttgcaccctgcctggtttcaaatcctagctctgcttattacgttcttttaaggggatgacctttgagcaaatgtcttaacttctgttttccccagtaaatggacacaatagttgctactttgtgaaagattcatgtaattgaccagcatttaccaagtagcatcagtgtttagtttcagtcattggtgattctgcagttggactgtgagggggtattggggtggggggtggtgtgtgtgtagcacttaattgcaggcaggaaggaaaagatacttttgataaccgacaggcagcttttctctgcttttgtgtcaaaagggaggaagggagtttggagagggaaatgaattctctgtaacactaagctctcttcctcaaaaccagaggtagatagaatgtgtaataatttacagaatttctagacttcaacgatctgatttttttaatttatttttattttttcaggttgagactgagctaaagttaatctgtggcgacgttctggatgtactggacaaacacctcattccagcagctacaactggcaagtccaaggttttctatcatgaaatgtaggttctatactaacaattaacaagtgtacttcaataaatttaaacattctcaggaataattgactttgtttctttttttcttagacatttcatattattttccttattaaatataaccaaaaatcccacagaaattaactgaggagcctctaaatatcaacaaaattatcacttgatagactagaattaaacaagcaagtggttccaagaaatggcacgagtgtattaatcataaaataaaatttctacatgaaacattcagccattctagaccatttctgtctgtgcagactcatcttttcctgttctttgcaaagcccagctagagcaagcaagttcttcccaataggtttttcccatctctggttgcttggctggctgggcttcctctacaaacccccttcctttcccctaagcagggcccggtgtccccatcccgcggagttgacctcatgagggcatctgaccaggagtagctattcctggtgctattgtcattgtcctgtttcatgtgtgaacatggctggctctacagagatttggcgggtagcaaggaggtttctttttgaatcttcttttggaagtcagacttgatgaggatcttatgcccactttttcctagctctgtggtgtcaggcaaagtctgtttctgcaaatgggggttaagaattcctacctcacagcagtcttttgataaataaataagatcttaagtgtaaattattccactagaaattgcacagtcactttggtcttcatcctggaggtccactgacaagcctcatgcaaacctgtggccctgttcataaagtgttttgatccatactttcaaatggcctcaggaagaccttttataaagtaaaaatgttaggcagccacatgatatccattgacccagtgaggctgttttactggatataagaggtttgacccggcattttggggggccgagacaggcagatcacttgaggccaggagctggagacctgcctggccaacatggagaaaccccatctctattaaaaataccaaaaaaattagctgggcatggtggcacatgcctgtaatcccagctacttgggagactgaggcacaagaatcgcttgaacccgggagtcagaggttgcagtgagccaagccgagatggcgccactgcactccagcctgggcagcagagtgagactctgtctcaggggaaaaaaaagggtgaggggagggtttgaaaaaatagtagcatgtagttatgtttctacaatatttgatatatataaggatttaccaacctcttgcattagctgctatcccctacagcagttgctgtaggaaaaaaacatcaagttctgagctcctactgtttgccaggcatattctgagatgatcacgttgaaatctcagagttaccctgcagagtagtcagggtatcactgcctgacagatgaagaagctgaggcttccagcagttaaatgacttaccccaggccacatagaaaatgagtgggagagcccaggtctgtctgtgaggtataatgaaattagcataaaccctccacattggcgccactcgcataaattaacatatattctctcacagaaagtattttattgggcataacagtttgtatcatttaccgtttaacattagccgtggatcttcccacatcacatgactatgcctcattctttttggataatatgattactattgaatggatttactatcattcacttaatcaatactccttttgatggccattttaattgtctattttttccttttgcacagattggtgtaataaacgtgattttatagtaatatttttgtctgcctgtgaaaatgtttgctggacaataaattcctaggagtcaaataaggtcaaagattataaatacagtatttattttcataaatattaccaagtcagccacaaatgtttaaattactaatggtttcagattattgtatttaatgagtaaacacttttatagggtttacttttatgaacacttttatttgccagatatcattctaagtcctttacaaaattaacttttttaatttgtaatataaccctgagatgtatattaggattatccccattctacagataagaacactgagaagttaattaacttgccacatatctaggaagtgacaaggctagttgcacagccaggcagtctggctcctgagtccacattttagacaacactatacctcctggttcttttgaggcattactgctggaactatcctaatactcataaataaacatttcttttggggagggccaaataaaattttaaacagaaaagttttcaccaactgtcaagctcataaagttgtacgttatacacttttttcatgatgcccacagataatttattaatgatatcatctattttaaaagacgtatgtaaaacccaacccttaagaaaggattcctatcactgttcccacaggcaccctcctcagtcttatacctttccattccaccccccaaaacaaatcattcagcatatttatttcatactgtaatagaggaagtagcttctttttagatattcttagattattaacattgatcatacaaacatggaatagaaattccttatgttttatctggatttaaggtgctacataatggaatctatttctatcaagccatacacattggagataatgaaatcacttgtgttctagcctaaacgttatgggaatttcagaactgcaacataacagataatccttggacgaaaactaaatctctcctctggtcaggcatctatgtgcatcagtgaagagaagacggggactgtggaagggaaaacagtgagtcaggaaggactgtggccacatctgttccccggaccctcaagtagttaaatcctgacctcctctaccccagactgtcctggggaacggccaacactggcttttcacaactgtgtgttaccagaaatgcaacagaaacccagctgaatccccagggtttcccttctgcccttctcaatggaaagatctgtcccaggaccatttattccaacattttcaattatgagaaatctgggaagataaagttattttcacatttctcaagaaatacatacttattcatactcatgacaggaaagtcagaatctacagaaaaccaagaagatttttaaaaatccatgataccaccatcaaaagagccacacttagtatgttggtccacaggtttcctagcacccttttctgttggtgtatgcacaaaatacacaatcacattctgtctacattttacaatttgccattttttgattaacactatatattgaccaatttttaagacctgcaacatatgtcgacaacattatttcagaataatatatttataaataaacgcacacacaaactgtctgtcttatatacaacacgtcttactttctaattctccactctggaagatttaggttttcctaactttttaatatactcaccaggaatcagtaaactttttttataaaaggccaaagggtagatattttaaactctgcaggccataggtttctgttgcaacactcaactctgctgttgcagggaaagaagccatacacaatttgtaaatgaatgggcatgactgtgttctgataaactttacaaaaacaggtggtggactagatgcagcctgctcctctggacatggcttaccagcccctgacatataccactacagaggatgctgttagaatgaaatctctttacacatctctgatcatctccttaggactaattgctagacatgacatcatggtagctgtgggtcaaagggcatgcacgctctgggatgtacattgccagattgctcatgatcagcctttctcatgtcaaaatgttttgtgaccaccagaaggctggttctgcttttattatccattgactgaggagtagaaatgatatggcatgtatgcaggatatttaaccatcgtatagataatccttgtgcacaagtgcattctatattctttcccaataggtctacatctgccagagttgaaataaaataaaacaaaacaaacctatttagcaccttctgtgtagcaggtccattcatgtatgttgttgtatttcattctcagaattcttatgacctaggcattttaaacatttttttaaaaatattgagttgacaaggattgtgtatatttaatgcatacaatgtgatgatttcatatatgtatatattgtgtactaattatcacaatcaaatttattacatccattaccacctatgctgtacattaaatctccagaatttgttcatcttataactgaaagtttacaccctttgattaatagcttcccattttccccacctccagcccttggcaaccaccattctactatctgtttttatgagtttgactctcttagatcccacatataagtgagatcatacaaaacttgtctttctgtgtctggcttatttcacttagcgtaatgtcctccaggtttatccaggacaggagtttcttcttttgaatggctaatagtccattgtttatatgtattttatttatccattcatctgttgctggacacttaggctgtttccatatcttgggtattgtgaatagtgttgtaataaacatggggcgcagatctctcttcaaggttctaacctgattgctgaatcgtatggtagttctgcttctaattttttgaggaacctccatactgttttctgtaaaggttataccactttacattccaaccaacagtgtacaagggttctctttcctctatgctttcgccaacacttgttatctcttgtcgtttttttataagagccatcctatcctatgaggcaatatctcactgtggttttgatttgcatttctctgatgattagtggtgttgagcaccttttcatatgctggctggccatttgtatatcttccttggggaaaaaagtccattggggtcctttgcctatttttaattgcattattcatgtatttattaatttttgctattgaattgtgtgaattccttatattttttcaaataaccccttatcaaatatatgggtcgcaaatattttcttccatcccgtaggttgccttttcattttgtcatggtttcctttgctgtgtaaaaccttttaagattgatgtagtcccatttatttattttcacttttgttgcctgtgctttggtgttacatcaaaaaaaatattgccaattatgaccaatgtcgaggagatttttccctatgtttacttccaggatttacatggtttcagatattacatttaaatctttaatccactttgagctaattttctgtatatgatgtaaaacaagtatgcaatttcattctttttcatgcactttccccaacaccattcattgaagagagtttcctttctacattgtgcctttttttttttttacagtacagtgaaagcaagtctattaagaaagtaaaggaataaaagaatctacattgtatatccttgatggccttgtcaaagatctgttgaccatatatgcacggggttatttctgggtgagcttggcatttttttttttttttttttttttttgagacagagtctcgctctgtcgcccaggccggactgcggactgcagtggcgcaatctcggctcactgcaagctccgcttcccgggttcacgccattctcctgcctcagcctcccgagtagctgggaccacaggcgcccgccaccgcgcccggctaattttttgtatttttagtagagacggggtttcaccttgttagccaggatggtctcgatctcctgacctcatgatccacccgcctcggcctcccaaagtgctgggattacaggcgtgagccaccgcgcccggccgagcttggcatttttatctacctcattctaccgatgaggaggccgagtctcagagagttcacagacctgcctaaggtcactcagctagaggtgatacaaccagggtttgaactgagatctgccaagcttctgagtttattctttttcccccacaccaaggatcctcaattctgccttactgacatcaggatccggtcaattctttgtgatgggggctgtcctgcacctggcaggatgtttagcagcttctctggcctccacccactggatgccaggggaatgcagaagaggcttgttcattctcccatttaatcctcaggacaatatctgacataaatgttacgtcttttattttataaatgaagaaaatgagactcagaaaggtttaagtgagttacttaagaacacacagacagcaaaggtagaactggaaaccgaacacaggtgtccacatgggacaacaaaaaagttcacgttccatcttcttttgagtctctcatttcaataattaccattgtgtggatatgagctgaagtacaggaaacctggggctgaactctcctcccatcaggcctaggagccccagaccagaaccccagcccaaggtctcccagtcaggcccgctggcgtgagctggcatctacactagcatggtctcccaaagctgcagggatgccagtctcgccgctgatgaagaaaatgaagggcatttgcttctcatgcaggctgtcgggatttaacacagattccttttcttgctctcttctcccatagcacaaaactgggtggtccatccccctcccagtgtcccaaggctttgttgcgtgttctctttaatttctcccactcttgtggtgcaccctaccctcatctccctggcaacctttctgctgtatcctctcgacacctggatcacaagaacacttgtgagaccccttaacaagttacatcccaaattatcattcccctttgtcctcagccagtgctcaggtccaacttgctctcctggggtgactttctttcctgcccaatatggtttcatcatctgtaaattggggataattaaagtcttgatcctgatatttgactctcaaagcagaagtagcaagctcagccaagtcacttcaacaagaggagaagttccttgtgaaccaaaagggcactggtcacaagggccgctccttcttctgtcaggcctctccagcacgcccttggctcagccaaagaagagactcaggctgtgcttctgcactgttgggataacataggcctcttccatgtggttccacaccaggaacatggggacaatcagacctctcccagtgtgggcataaggatacaagatcatgtcaatattgacgttcataatggctgggcgcagtggcacatgcctgtaatgccagcactttgggaggctgaggtgggcagattgcttgaaccccagagttcgaaaccagcctgggcgacttggcaaaaccagtctctactgaaaatacaaaaaattggctgggcttggtggcgcacacctgtagtctcagctacttgggaggctgaggtgggaggattgctcaaacccagggaggttgaggcttcagtgagctatgatggcactgctgtactccaacctgggcaacagagtgaggccctgtctcaaaacaaaaacaaagacaaaacaacattcataatagtagcaatagctactatgtgccaagcccaggcacctcttcgagtctttgctgtcaccctatcaggtaagcgtgcttagaagttacacgaagcacacggctcagtgtttggcccatggtaagggcctaaaaagggatagccccagtggtggggatgctgctgctgctgaccattaaccccagtctgctccaccttcttccaggcagtctgtgagatgtttcatgtccgaggcaaacagcacattcagatccccaagctctacacctccagtgtgaccaggcacctgcaccacttcaggctcatgcaggactcacagcctttggacctcagctaaaggacttgcttctcttcagcacacggggcttgtttgtgttggggtctgagccctgagcccatggtcaaggagacccccaggtctttctgaacagagacagctggcctgggggcctccctctcactgcgtgcaagaggctgttagggtgcaagactcaaggcgctgagggaggctgtttcaggagggagccccaggagggtggtggagacagaagggggcagcatctgccgaggccctactgtgtgcctggcaccgtgtggggtttctggcccatatgggctaagtgaccctgcacactcctcttaggagagaggctcagatggagaaattgcagttcaggaaggtgaagcaagctgctagcctgtggccatgttgggatctgggcctcagccttccagccacgaaggcagccaagtgtcatgaagaaggcatcacagaggcaattccaggctgtagtggtgaactttccactctgcatccccgggtgctgtgccctgtgccctgtctaaggtagccctgtgggtttctatatgtttaaattgtccccagcatcaatgatgctctcctgtggatcccaagccatggagatgtcctgggacttttcatttttaggtacctaaattgaatttcccaacacacagaagcaagacagccgccctaacagactcttgcatgcagtgagagggaggccgccaggccagctgtctctgttcagaaagacctgggggtctccttgaccatgcgctcagggctcagaccccaacacaaacaagccccgtgtgctgaagagaagcaggtcccttagctgaggtccaaaggctgtgggtcctgcatgagcctgaagtggtgcacgtccctggtcacattggaggtggagagcttggggatctgaatgtgctgtttgccttggatctttatttgtgattcagaaacagtggaataaaaggaaaggaaagaaaacctgaatggccacctcagcaggatgctccaagggtagtgtccaggtggcactgactcagatatgtgggggcttcccccacccatgctcaagagccactttgccatttcaccatctctctgtcctccacacccctcagcagcaagcacaacaagaatgtgttcaccatgaagctcaaatctcagcagaatctagagtctgaaatccaagtaagggaaagtgtagagcttcttggatgatgccctgtcaattttattttaacgaatgaaagaccagaagaagtcagtcttgaaaggagaggacaggagcatctgctggcattagcagccgtgccatcgtaggaccgactcacctggacccgcggccacctgtgcttttacatctagtcttggttaaccatgggccacttttccagcttggaaactaagcatatgctccacttcctctccttcctcattgaactctttcactaaaagaacagtgcaagagagacttaaactgtttgcctcattcttaagacctttcaggaaaagtgttggcagggaaggaaatctcccagctctgggaaacagtcttgtggattatctgctggtttcattgatctgtgctgtcctccctgcattcattaggaaaactggccttggttcaaataagaacaggatttgtcctggtgacagagaaaggtttcttctgatgtccatatatctccgagggggatgctttctccaggcagaggctgtggccaagcgatcggggggctcagagggctgctgggaaggggtgggcccctctctccccagagggaaactcctggggacctctcgagcacccctgcccatcctttaaacataaattcataaatacaaacaagtaggccattcacagaaatatataaaatatgtcataggacgggtggcactctcatatggcaataattatgacaggggccggcaaatgacctgcgtgacccggagtgacctgagcactgactcccaaatgccctccataggatgttctgcatccccgagaccctttcctgggtcctcctgggccctaccaccccctagaccatccagacctcaggtcatccccctgtctgttgacagagtagtctccgttcctgaatgtgctggtcaccagcaacagcagctgctcctcctccgggaagctcagcctatacttctacacgcagagaacctggacggcacccaggtggacctaagccttcagctcccagtagacgctctgggtttcctaccctgcccagacactctgggcttccccccacacctcccctcggccggggctcctgtgtgcatctgtctctcccagtgcccagcacaggcgtggaacggaagaggtgaatggaccgatttgaacacatcatcctggattctccgttccctctcaagccctgcagctaacccatcggcaagccctggaggctctgcctccaaaatcctgcctatcccatgtgcaaacgcctctcaccacgtccactgctatttgcagttctgtgtgtgtggaaatacttccacaaatttggaatgaacaggtcacggctgtgcctggagggaatggccagggaaatgtgccctcgccttgctgttctatccaggcccacccagctgaggatgggggacctgccaccactctcctggcagttccggactcctgggaaccggcaggtgaggacccaagagtgttttcagtgacccggctgacctggtcatccgtcagtcccaccttggcctaggcctctatacagcacagatcacagctcattccatcctggcattacactggcctgtgccctgtcctcagggtcacatccgtctcccagaagccgtgcaaccctggaaaacccaggtctaacagtcaggttcctcctccgtgcattaacaatggcgttgacgcctgctttgcggcacgctgggaggggagagggaggtgtatgctggagagctccccaggggcaaggcctggctctgcgtcacccactgtcagatcctgagagcctggggctggcccagcacgtggccaccgttccctaagagttggatttcatccctcagtgctgaaggcaggggatagagcttagacagaccccctgcgtcctgtcttctttatctacagctttctcatccttgcccctttcacgtgcacccggcagagcaggtgttcactgagcttgagcaaaattcaagctagagcagctgatggatcttgaggcctagattcactgtcaaagtgtttctcaaacggtgctctccagaacaccaaggaaaactcattgactgtgtaagtctgaaaatccctgcccaccggtctacctttgtgtatgagcgatcagctctaccattcagcccaggtgtgtgtttgctggaccatgtggaggaagctgaagagacgtgagctgaaggcagagggtgagtccaaggtgggatcttgggacaggtacgagaagttaggcaaaaatgggataattctagccttcataaccttagataatagttcacattattatttagttaatagaactgtacccacattaaatttcttaaatttttttaagagataaagtctcactctgtcacccaggctggagtgcagtggtgcaatcatggctcactgcttcctggaactcgtgggctccagcaatcctcctgcctcagcctcctgactaggtgggactataggcacacgccaccatgcctggctaatttctttgacttttctctagagaccgggtccacctaggtttcccaggctggtctcagacttctagactcaagtgaacctgaacctcccgcctcgacctctcaaattgctgggattacaggtgtgagccaccacacccggcctaaatttcttatgtgccatgggactgcaaaacatcattattaggggcagctggatggaaggtataggaggatactatagtgccttttcaatatttctgtctaaaatctaaaatcatttcaacaggaaacatttatttcaaaacatgaaggtggttatccttccatgagtttgaagtacaaaggtaggctcacggtgtcgtcagaattcagaacgatggtcgtggggctgggggtgctgggaggggctgggcatggttggctttgtgatctggggtctggtgtgttccatctctgaatctctctcgagctgcactctttcttaatacattttcataagtttaaccaaaaataaaacgaggatgcgaagcttgcttgggttgttaagcctagggaaattatccagccatgagccctggcccagatgcttctagaagcctggagggaactgagaactttccaagtggaggccgcagaggcaaggccctgaggtgggagcacactgctgttcgtccctagctctgaagggggtgccctggtcggaatcagtgctgggtgcagcgaaagccgatctcacccgctccgcagggtgttcagcctgccagcagggggccagctggtcctcctgggatatggcacggacccagcagctctgtctgaaatcataatggcggaaccaagggccctctacgtccaggtccgttgggaggcggggcatggagttccactgcaggaatctccaggaaccctgaggtcctccctgagccagggccgggctgggcacaccctgagtgcccacagggtaggtgtcttcccggacagccccaccaggacagggtgtggaagaacgaggtgcccgtggcggggaagctgaccaaatgggccgcgggaaccgggctggtgggcctggaggggcctgcctgtcccccttgcagagggtcttcccgccacgtgaagccggcacaggcctggatgccgacgacccttgctcgggtttggctgaaaggaaaacagacgcggtcagcatctccagtgagcccacgcaggcctttccgggctgggccccacctgcctgcgtctctggagtcctcggggtctctgtgtggcccccgtggcctgacaccgaggacacgcctgtagtctgctgatcccagagggaggggtgcgtgctgcctggcgtggggaagctgtcgtggcatggcgggtggctcctgggactgcccccagggttcagactggctgggggcttcctgccacacaccttcgtcccagggctgttgggcctgggatacggcccccagtcagaactcaggtgggaggggccttggatgtcacccagccccttgtcacctcacgtggggacccgtctccgcagtgggtgattgggcccggacgtgggtcaccctctgccctcctgggctgcccagtccatgccaggactgaccgttcccacttctggctgaactcttggctctggctctgggcccggggtcccgcctgtgccctctccctgaatgctctgtgggtcagggacacggattcccttgtctccctggctccaggcttcttgtcctggcaaccttggaggagcgtgcaggagtgaggggcctctgctgctctctgaggctgtgggtgcttgcagggaggggcggggtctcccacaaatgggtctgggctcgtctagtaacttggagggccctgcgagggggagagggagacaccgtggaaagtgggagggggcttgttggagggtcttgcccacatccccctcctgcgtgcacagcatgtccagtatacacgcactgagcgcctgccctgaggaccggtgggcctcctgtactttcttagagtccaggaggaagaggaggaagaaaaggtgaagaggaaggcccaggtagtagggttgcgggtcccgggcactcccctactactgactaccccagagggtgacatgggaggggacatggcactggagcccacctgggggtggcaggtcccccttctttcttgttagtttcttcatagaggccctaagatgcttgagcacagtgtcctcatccctggcccaggtatcaacgaaccggttgcaaaaacgtgcccacgggccacacctggacgtcttcgtgaggcgctctagggacagggtggatatcaggccaggggagttacctgggaatggtcacagctcataccccgtggccacttcagtctcctactgggcggtgccggatccttttgtggccaccccaggtgtccagatacacacaggagactgtggctggggggcgatccggacagggaagtgctcaccacactctcgactttcatctgggtcatgtgggggatgggctcggtgtcacagtgtcctgcccagcccacctggccagacctccctctgggccagaacagaggatcatgaggacagtgtgaggaagctgccctcgggccagtcggggtctgaccccagggctccccaggccccgctgggcacacgtagacttactctgctgaaccttaaaggcgattcttgttatcggcatcaacgcctgttcgccttctaccagatacacgtcccacaggcgcagggtgagcccgagagagatctgtggggacagcaggtgtgaaagaacctggtccttccaggctggggctggtggctcgagctgcgcacactggggcttcagtctccagagtcagtgaccttccccatgagggtcgcctgagccctccaggacgctgggtcagacaaggtcttgaagctcctcatggggggcactcatttgagtggggatgtggctcctggagagaggggcttgcccagggcttgaggcttccctgagccctctcaagtcgggtcctggcccagtctgcccatgaggctgggcctgagccccagccatggccctgggatgaccccccttgggcagagggttttgctcgtgtgtcctttggggacccgcctgagcctcctgtgggctgggagtgagccagacccccgggctggggaagcagggcactgcagggcaaggaaggtccctgagccagggtctccctatgcctccttaccccgtcaatcaatatccggatgaggcagcctaacggggaacactgcccacatagatctttcttgtcctgatggaagcaacagaggtgctcaggccactgggctgccctaaaaacctccctcttccagggcctctgaagacccttcccctagtgcagaacactgggcggtgtccagagctccccacaacactgtcaccttcccacactcccggtggacacactgccctttgccctgctctgcgggagctgggccccccatccctgtgcctctgtctcctccagggcaggaaaggaaaccaactcccagcccatggagaacccgacgtcccaggtcaggccctggctgggactcagccagtcaccagccccacgaggggctccagcccccctgctcctacagccccacgggaggcagggcctctgggaagagctgaggggaccataaactcacctgatgccccatggtcttgggttgtgacgtggctaccacatgctcctgttggtcttggagcccctggacggtcccgccatttgggctgtgaaatcctgagaagcccccagcccatcatgaaatcagagccttcccccaagatgtggagccatcagctgcaagagctgggcagctggagaggcccccaaaccccaaggcctcccaccctcccgtctggtgaccccaacatgcggcctttaccctggggaggtggggcgggaacattccctggagcctggctggaggttcccctggaggcctcctgggccagggtgcaaaaagggcaagcctgactttcaggccacgacagggtggccggaactgggtgggcgctgggcttcccggtcatctcctggtagtggggtcgggccagggaacaggggatggggagatgctgccacctgggcttggtcggcccattcgtgggcaccgatggcagcaggagcccgggcagctggagggcaggaggactctcagggaggggagagtcagctgcacagaatcagagccggagggcgtggctccaggacacagagggtggccacggggaggatgagatgccctctgctgatggggatgagaggcgtctgatttgggctttgggggtcagccgtggactcctgtgggaccctcagcagagacatcctaaagtctcccaacaagctggcgacacaaggagggtgccttggctgaaagctgtgatcacctggccagggtggccatccccaggtctggctgcaggaggtccccggggcagctgttcacttaccctgcagggagtgcctctcactggccagcagctgcaccagtgcccagaatgcatcctcctcaggaagatagaggaggaacaaggcggcgatgtggctcaggtccctgcagtagcccacctcctgcaagagccagagtcaccatggaaggacatcacctgggagggctgaggtcacctgggaggactcatgtcattggagagggcagaggtgactggagaggcttcctctgaaggagaggcttcctctgaaaaagaggcttcctcaggatgcacattcatttcatgacaagagccaagtccatcaggcacttcagcaccttgtccaaaatgtctgctgatagcaccatcctgtgtgcgatgctgccaagctcctgggctttggggcagccccaggaggagggcgtcatttcttgttctgagaagtggtggtcaggcccaggtgacaccaggagtccaggccctgactcctttgtgtctcagcttgaccccttgagaccacccccttccttggaggtttatgccagcggtgagctgacatcctacctcctatatcctggtgggtcacaaatactaactttaaaagaagcaacgacacccccaccagacacccactcctgtcaatatggaaatatggcccgggaacctcactgccgggaatactcaccgggttgtactcctcatatgccaggaggatgtggagtagttcccgctgcctaggaaacagagaaagggggctttggtttgttttgtgcagatgttgttaatttcactttgtctacaaagcctaacagcaaatcccatttcaggttcagatgtttcaccagataagcagtgagctcttcagggcctgagactcttgaagaaatgtttcagtaaaatccacatctgtgacatgcaaatagcccagttgtacagtgacttgcctgatccttttcactctgaatgatttttttttttttttttcagtttgcacacacgccagttcagtctgtgggtgtacagttcctccacggttccaaaccgatgtgcagagtctcccggccaccgctccagcccctcctggggcgactccttcatcctccaagtctccagggtggcccctatgcacccagcctctccccgatccgtcagcccctggccacccagactgcttctcagtccctgtggtttggccttttccagaatggcctaggaatgggaatcctactgtggtagcttattgggtctggcttctgtccctcagcaaaatgcatctaggatccacccacgttcgtgcgggcatcaccggctcgttcccttttctcactgggtcttccgtttgaagggaggaccagccttgctctccccatccccgtgttgaaggccgtccccgaaggctccgtgtgtgagtgacgaggagtcaagcagtgaacctggcatgctggtttcatgtggatgtcagtttgcaaatcagtgggttcaatatctgtgacactttggggatgtgtggttcaagtccatcgagctttgtgagccactgcccaacgggctgccaacgtggctgtgccatgtcatgttcccagcggacctggatgagagtttccaggacccctaattctcccagcatttggtgctgtcactgttgcctggggggggctcatgggccctctatcctgccaccctcccgtgggtcctaccatgggtccccatgggtcagggagagcacccttcaccattgtgcatgatgttgtttgctgccttccatctcctcaggatcctcctgggttctggccccacatgttccagtctggcccagggcttggaaccagggaggtgctcggttcatggtgccggctgctccctgggccgggagagctcttggcagctgtgtcatccctcctgggtgaccctggcttctgctccggggaagcccccatccctctcattcaccccatctctgctgggaccctgtggctcccgtaggcttacttggttccgtatcgatccctgaagaatatatgcttccttaatgtcccgcttacgtcccggtcgatgcgctggatgtgctcagatgacctcttgcccttctccttcatgatctgtagggcagggccaagaggaggaagcagtctcagaacagatggaagactccctgcccccagtggcagtcagcccacagtcagcacttcgggaaggaaggacagaaggaaggtttccttctgcagaaagctgcattttggcttgttactgaagccagggagggtcaccagagctgagtttgtctgtggtgactgtgtcaccatctgtgcccagggtgttcatctgaccttcacccccagctccccagggtggtcttgacgttccctccagctggagacctgggccccgacacggcctgtcctgtttgttgtgctctggctgagcgtacctggtatcttccggggtttttcaacttcatttcctcagtgttcaggaggactgaccacatcgggccccggatgttcatgggcattcccttgtacgctcgatctatgagctgtgggcagaaaacgatctggtgtcacaggccacggggtgaccccagtgaggaccagagcccggggattctggaaattgtcggttttggccccatgattcctcagtagaggtgagatcaagctgggacagggtctcccttcccaggactgaaagagtggatggacactcagagtcgaaactctgatctgaaccttttccttccttcaggtcaccagggcatccctagccttgagctccgggtagtcccagccctagattcagattccctccctgcaaggtgacgcttgcacgaataggcaggaaatctggcgaccaggcctgcagtcctctgggcgaggacagtgtgccgcccaccctctgagaggctgatggtgccaggccacagccatgggtgcctgtcccctgtctctgcagagagtgcttcctccctccacacgttacctttctgctgcttttgtatttctcccagtctcccagcatatccacccacttgctctttcggctgatctcccgccgaatttgctgtcaaatgaggcatgttggagttagcggagctgccaggcttcccagagccgcccgcggatgctgggtcttgggctctggagccctggtgggagccagctggaaggagccagggaagggcagacctcaagggctgagagcctttgagcaaatgagcaccagtgggctggctttgggaccccgggatgtaccatcctcaggccacagacacaccagtcttaggtcccagcctctaggtggggtcctgacacaagcgcgcagccacccccaagccaggactgtggttctccttttggaattttatcaaactgccaaagtgaacagcaacctggggtcaggtccagcagggactgctgcccctcccagtgacagcgtgttgccctcacccgccaccgctcaggccagctgcttcctctgcctcactgaccacccgcccagtccctacgtccctggaccagcccctccacgcatcaggctcttaccttcgcctcccgcgcagtcagaggaggcagctccgtctcactgtaaggcaacccaggcagagctgaggaactgcacggggcctggagcggccccagcctgggtgccgacccccagaaaggactggctctgtccctttccagctcagggctcagcccaggagaaggcacagggaagggaggacaagggccttcctgtggggctgactcccaggaggggcaggacctgggagaagaaggagtgtagggacagcctggccggggttactggggcccctggcgtggggggcggtcaggctgcccaatggggctgcccgtcctggactcgaggtggtgctttctgctggagctgagaaaggttagccctgagatgggatgggggccgcccagggtgggcgaccgggccctgacaggagtccctcagggagtgaccacatccccccgccagggtcaagggagcctgccctgagacctgcccggtgtactctggctgcaccaggggcccaccccacttgacagccccaaggcccttgcaggttctgacctcccagcatccacctgcctctccctgcacccgagccacacaccctgcgtttcagaagtggcacggctcgtcagctccctcccgccctacctccccagggatcctctgtctctccatcctgtgatccctgagggatgggctcctggctgggctcctcttacccggccccagatcccttcccagcaccagacccaggtctttagccgcgagccctgctgcctccctggcctcaccgtgagatgcccagaacggggccctgcccatcttctcccccgttctcctagggctacagcccccattgtcaccatgccttttcccctcacgggacagtgagggctgtagctctaggggaatgggggagaacaggggcaggtgggccctcagagacctgctggacaacagccctgaggctgggccaggcgtctcctcaccctgtggccataacccttgcatctcaccggggttgtctccaagtagacagggccagaccctcaggctgccccgctcctcttgtgctcacttgccgacagaactgctgagcgcccaggggcctgacctagcccagtctccattcccaccggctccctagatgggccccacacctctggcctaacaacctcgggctggacctgcaggggagtcagggaggagttctgtccctggaaaggaggttgacccgacctggtgagacatgtcctgcgtcagaaaggcctttctaaaagcaaacccatccctgagctgagacaggtgctttaggggtgaggggagtgcagaggactcactgtacaatccccaaatgatcgacgttgttgttgtagcttcgaaaaggcttaggccccttgtcctctggcagcccagctcggtgtccctgtagcccagagggagccttggtgaggggtccaaggtaaagggtgcaagggcctgggggcattggccacccgtccctgccctgtgctcctagggagcccaggaccctttgaccagggcacactggaagaggcctccctccaagaagcagaccgacttgtaccttttcgtatttcataatgatgtcctctcgctcttgtgcccaccaactgcccgcgacctctaccacgtccatcctgtgagacagaattgtctaaaggtcacaccgtacgcggcggcttcggagaacacctgaaccgctctcgccgggctcccagatgctggctggctgcgtaacccccattccaccgccgcccccagggaaaaaggggccagacccagtggcccacagctgctccagtctctggagtctcaagtcccaagcaggggtgggcatcttcccaaggacttgagtacagtgggacctagacagagaatcctgttgtcccccaatgccatgaaatggggacacaccggccccagcaggttgaatggtttccacctgccaagggtgaagggcccatgatgggctattccagggatgtggaggcagactggggtcagcgaccagaggtctctgtgcaatcggcctcctgggatgctcagggcctcagcgatgcccagtttcctacagggaacaagatctctcccgactgctcggttctactccgctcatcactttggctaccgtggctcttcagtctgaacagtgaagccactttaggaataacgcctgttgagcaggagggtgttgggtttgggggatgagaaagatctattgtacgcatggaaaccacgtctctcgcggagggactgtggagtccaccattctgagccgtcccaacaggaggaggcttcattttcctgggtcactgaggaagaacagtgggtccttggtcctggagaacagctggatggaccgtccctcctgggaatactcgaggcaaaaggagggcgaggcctcaagaggaccacgcagagcaagaaatacctggggagaaccctagtgcccggacccctttgaacacaagggaagatagtctcccctcagccagccctccagggctccttcattttccacagctgcccaagggcagcaggctcccccggacaagggaccatgtgtgttcagtggggcccacagcgaccatcaggacccagcttagggcacagaggtgttctgaggaccgtcagtggatctgtaccagtggctctataccagtggctctgccaggaccaggctctgccccatcgggatgggaaacctgggcagatttgggatctagggcagggaggtcacagggttcaggcctgaattccagcacagcacacggcagggctgagagcaaaactcagggtcatgtccggattcccaggccggttactgcctctctgaccccagacgtctcatctgtcgaatggggacatttgggaacagcacccactctacgaagccaccatggagacgaaagagccaatcgtctacacgggcagtgtagaacgggcgcctggtgagtgctcagggatgaccctcctcggtagctgccccacagaggccaacaccgcccgcaccgtagccactgcccccaagtccgcctggagggaagagagcaggtcacgctcacctgattctgatgaatcagctggcctgggtcgtgcctctcagggagaaaacctttgagtccacagagctgctcacagataccactgcctgtgtgtaactgctgtagaccactgaggcagaccagagagcagataggtgctaagcaccagtgacattctgaggtcatggcacgaatcacagtggggccttgcccgggtcagcagcgcccagagtcagggtcctccgctgcctgaggcgtcaacatgcctgcctgcaatgtgtttgtgcacgtgcgtgcacatgtgtatgtgggtaaacacatctgtgcacgtgtgtgctgcttctctggccaggcccggctgccccactcatgtgtgcacccagttcctcatcactgtcacccccgaggcccagggccagcatcagagcatccatggctgctccctaacctcagccctccccgcccagggtggtcctgggatacacatagcggtggagggaagtgactgctgctgttggatctcagaatacaaaagctagtactattacctaatggtctttttagtgtctctaatggtatcgctttttcatttctgatattttaactgggtatttctctccatgacccttggatattctagctagaggatcctgtggggaaagtgccgggcacacagtaggggctcactcttctagacatgttatctaaaacctggttcatctgtccttccacacagggcctaggggatgccaaattccaggggccagaaagagcttgggataaaaagaaacttcaaggggacggctttgacctgggctgagtctgcctgtgccatccaactggagtctcaagtcctgaggcaggacgtccagatgccccagtgcagggtcctcctgatcaacacctgctcccctgtactcattagcaacctcacccaccctactctcaaagcacacttggctctcgtatccaggagctctgcatctgtagattcagcaacagcagatggaaaatattcagaaaataaattggacggttatgtttctattgaacatgtgcagagtttgttcttgtcattattccctaaagaatccagtatcacgaccatttatgtagcatctgcattgtattacacatcatgaataatccagagatggtctaatgtctacgggaggatgtgcatagctgatatgtaaatactaggccatgttatgtcagagacttgaggatccatggattttggcatccccggggaccctagaactaatccatggataccaagggatgactgtataaactcactcaggaaggcttctcattggaggaaggtcccagttcaggacacacagggacatctccctggactactgtccattcatccatccattcatccattgtctccccccacccccccatctcggactgtcccagtgacagccctagcaagaagagacaagaaacaagttcacgttgtccagttttgaggtaatggaagaagttgcaccagtatgagaatagtgggtcagttttctacaggatgcagaaagcatatcgggcagcctcggggtgcggaaaggagcctggcctctctagcagccacacaggcctgcagtaggatggggctgtggctggccatgtggatcacttgggcctcatgaggggaaaggaaataccaggggggcagaagaggagcatgggggcagctggttgcctaaggagaaggcacctcagggaaggggactgtattcatttgttttcacactgatgtaaagaaatacctgagattgggtaatttataaaggaaacaggcttaattgacttgcagttccggaaacttacaatcatggcagaaggggaaggggaagcaggcaccttcttcacaagatggcaggagggagattgtgcagtggcacaatctcggctcactgcaacctctgcctcccgggttcaggcagttctcctgcctcagcctccctagtagctgggattacaggcatgcaccaccacgcctggctaattttgtatttttagtagagacagggtttcaccatgttggccaggctggtcttgaactcctgacatcaggtgatctgcctgcctccgcctgccaaagtgctgggattacaagtgtgagccaccgcgccaagccatatctgttctttttttttttttttttttttgagacagagtctcactctgttgcctaggccaggctggagtgtgcagtggtgcgatctcggctcactgcaacctccacttccctagttcaagggattctcctgcctcagcctccctagtagctgggattacaggtgcatgccaccacacctggctaatttttgtatttctgtagagaccaggtttcaccatgttagctaggctggtctcaaacacccgacctcaggtgatccgcccgcctctgcctcccaaagtgctgggattacaggcatgacccaccgcgcctagtccatatctgttcttttttttttttttttttttttttgagacagagtcttgctctgtcgccaaggccggagtgcagtggcgtgatctcagctcactgcaacctccgcctcccgggtttaagcgattctcctgcctcatccaagtagctgggactacaggcacctgccatcatgccaggctaatttttgaatttttagtagagaaggggtttcaccatattggccaggctggtctcgaactcgtgaccttgtgatccacccgcctcggcctcccaaagtgctgggattacaggcctgagccaccgcacccggctagcctgtgtctgttctttaaaattgttttgttttccttactctcagattcttcttgctgcttattgtgccttgttgctgcctgttgtgcaatttcttccctcttgtattttactgaacttcatctgaagaagccttagtagccagataaacaagcttgtttgggctaaaaaatcaattgctgtgtgagagtttgttggattctcttctgagtaaagggtatgtgttttattgtacggactttgtatcacctattttggcttttcatccaggccttttttttttttctttctttttagcttcctggttctagatacaactgatactctgatacaacctgggtaaatgtggtcttgagtagtaaattatctgtgaagcttctccgaactttgccacataaatgagcctgctcttgttgtgaagtaaatcttactctaatctgtatgtgagtcagtgggaaataactgagccttcggatggcttttgttgttaactgagattagttctctagattttagtgattttgttttgaacaccatacaagtatgtggttcttggtttatttggtcacttgtaatctctttaaaattttattttaaattaggaagtattttagaaatacaagaaagtcacacactatgagattaaacagatgttaacattttgccccattttcatcagactgtgcatgctttttttgggggggaataaaatgtcacagataccactaaagcccgtttccatctcgtcccaccctgcctctagaagtaacttctttcttcaggtaggtgcgtattattcctttttattcctacgtatagtttaaaactttaattgcatattagtagccacaaacatcacataccaatattctgtgccttttgcatttttacattaatggtaattatttttgaccttctgcaaatggctcttttcagtgtttcttgttagaaaacttggctcaacttgagtttactaattatctgcttcttcttgtctttagctattatagaactgttccaccaaggcaacaattattgctattttaatggtgaaatcagttttattaggcaaattgactcaggcttcagactggcatttggaattgtcacactggagattttcttttactgaagtctcaggacattgacaatcagaaaaaaaccctcttgagtcttactatcgtacatgtaagatatgttcctgagtgactatagtaaagactcattcaggaaaatgttatctccgatttctgcctccctagctcataggaaacttccattgtaaagttgttaccaggcgtcaagctgcctctttggtacagcccttacttagtatttggctcagttgaagtgcagtctatataggaggccaagaagacttaatcctgggtttgaaacaaagcaaggatacactaacattctatcctttaataacatcaagtagaaaaattgaaaatgagcttgttatcagtgcacttttatatgccaaccttgtttcacttgtgttttaaactgggaaactgaagattttaatgctgaaatttctttgaattattacctgtttttttgatagtggaacacacagctaatatttactaatatgaaggtgtcaaaggtgagaaatcatgtactacaccatcaggtcagcactactgtttggaagagcagcatcacaaagagcagtgttacactgcgttgtagtcagcacatacacttatgtccagacagatattttaaattaccttcttggggtagtacacatatgctgatatccaaagtgccatataatacaatacatagtttttaaacttcatatcattctgatcagaagctttataaactgttaggtgaatgctgttagatgatatgagagcacaatttaacctgtgtgtgtgtatatgtatgtcttaacatctattaagtgatgactacatatgaggcactaagtgctaaaacagagactttacatagattatcccattattggtcaactttttaaataagtgcatctctaatataagacaagatgctgaccaatttttaaaatgtgaatggatttctatttttaagataagtacctttgttcctttggttcctccctcccacccttccagaaatggtagtatcctggaaaaaaaaaattagtagcaattcaagaaacagcttaattcattagtataaatagatgagtttcccctaaacacaggaggagttggaaggtacttgaaattggatgttgtgcatggtgcctttccaaaatgcacaaatactttctctcaaatggttgcagtagtaatgtgctgtgtgatttggcatgtataatgttgtacaggtatcttgacattggtggattaactgcttggctactgtgaaattcactgtagatgttgatggatgaaagtgtggttgcctaggtaatgattaagaccagtaactaaaccacagttattattttgctggcataaacttcaaactcagaaaggtttttattcattttacccattggagcataccccagtaagtgcttcatttctttgtgtttctgattttttttttttttaagatggagtcttgcttttgtcgcccaggttggagtgcaatggcgcgatttcggctcactgcaacctccacctcctgggttcaagcgattctcctgcctcagcctcccgagtagctgggattacaggtgcctgccaccacgcccagctaatctttgtatttttagtagagatggggtttcaccatgttagccaggctggtctcgaacccctgacctcgtgatccacccaccttggcctcccaaagttctgggattacaggcatgagctgccgtgcccagccatgtttctgaatttttaagtcaacttctgaataggcaaagaattctttttgtttttttgttcaactttagtgctataaatcgccagttggacacaaaggttttagtgctatttaggtatgttttggtgaaatagtgtgaaggaatattgctgcttaaaagataagccattcattaaatgacgtctttgttttgaaacatgaagacttatgagaagcattttttttgtaagccaaagtagtttcactttatgtgttacagattttgaatagctcattatagactttgtaatttactgtctctcatttaggcaggtaattttagttgccagctaatcatgtttaaatatgtattggttattaataaatgattacccgtatacaggtctttcatgcagatatcgtactactctgatgttcttacctagttttgtggtatgttcagttgtctaagagcattgttgatctgcacacagattttgtttggtctatacagtgtttctgaaaacttgaattagttaccattaataaaaaatagagagactgcacatgaaatctgaatttgtagcttttaaaaaaaaaaattggaagatcaggccaggtgcggtggctcatgcctgtaatcccagcactttgggaggccgaggcggtcagatcacctgaggtcgggagttcgagaccagcctgaccaacatggagaaaccccgtctgtactagaaatacaaaatttaccgggcgtggtggcacatgcctgtaatcccagctactagggaggctgaggcaggaaaatcgcttgaacctgggaggcggaggttgcggtgagccgagatcacgccattgcactccagcctgggcaacaagagcaaaactccgtctcaaaaaaaaaaaaaaaaattggaagatctgtcagcactaaacctgccagtcaccatagcgataattctttggctccaagaaatggctaccacctccttcttttaaggggttgtgcacagcttccacatggcttgctacacttacctgcctcaggaagcatttctttgtgatttagggcatctgtgtttttgttattttagatttagaacattcaaatgtctggaaatgaatttgaagttttgttttaagcaaggttatgactaaattgaaaaatgcacaagaggccaggcgtggtggctgacgtctgtaatctcagcactttgggaggctgagacgggcgaatcacgaggtcaggagtttgagaccagcctgaccaacaaggtgaaaccccatctctactaaaaatacaaaaattagatgggtgtggtgttgcacacctgtaatcccagctactcaggaggctgaggcaggagaatcacttgaacctaggagatggaggttgcagtgagccaagatcgcatcattgcactccagcctgggtgagagagcgagactccatctcaaaaaaaaaaaaaaaaaagaaaaatgcacaagagtgttaaacaagcagttcacagtggaaaaacttaatggcgcgtgcacacacacacacacacacacgagaaaagatgcatagtaaccaatgttattagtaatcagggaaattctgattaaaccaatggactatcagtacaaaaatttttttttttaatttttgagacaaagttttgctcttgttgcccaggctggagtgcaatggctcaatctagctcactgcaacctccactacctgggttcaagtgattctcctgcttcagccttccaagtagctgggattacaggcacgcaccacaggcctggctaatttttttttttttttttttttttttttttttttagtagaaatggggtttcaccatgttggtcaggctggtgttgaactcctgacctcaagtgatccacccacctcagcctcccaaagtgctgggattacaggcgtgagccactgtgcctggccaggactatcatttaatacccattagattgtcaaaaatactaaagtttttcagaacatgctgaaagtgggatttcttcattctttgctcatgggaatgtcagttgacaccactctagaggataatttggcagttcttggtaaagttgaagatttatgtccaacaatccagaaagtccactattaggttcctttccatggaaaaattctctcatgtgtgcacaggaaaacatggaccaagatgctagtttgtttgtttatttatttatttatttatttttgagacagagtcttgctctgttgctcaggctggagcgcggtggcacaatctccgctcactgcaagctccgtctcccaggttcacatcattctcctgcctcagcctcccgagtagctgggactacaggcacctgccaccatgcccggctaattttttgtatttttagcagagacggggtttcaccatgttagccaggatggtctcgatctcctgacctcatgatccgcctgcctcggcctcccaaagtgctgggattacaggcgtgagccaccgtgcccggccttaatttttgtatttttagtggagatggggtctctctactctctatgtcagccaggctggtcttgaattcctggcctcaagtgatctgcctgcctgaccctccaaaagtgctaggattacaggtgtgagccaccacactcggtggtaagagttattgtataaagttttgacataatttatagtatcagccttcttcctctatcctcacagaaggcctcatggtgagtttgatgtgcaggttaaaatatataattattgcaatatgttgtaagaaatgtttcctaattaagatttttatgaaattaaacgtatttatttatttattttgagatagagtttcactctgttaccaggctggagtgtagtggcaggatttcagcccactgcaatctctgcctcccgggtttaagcaattgtcgtgcctcagccccctgagtagctggaattacaggcctatgccaccttgcctggctgatttttgtattcttttttttttttttgagacgtaggctcactctgtcgcccaggctgcagtgcaatggtgcgatctcggcccattgcaagctcacctcctgggttcaagtgattctcctgcccctgcatcgtgagtagctgggattacaggtgtgtgccaccagacctggctaatttttagtagagatggggttacaccatgttggccaggctgatctcaaactcctgacctcaagtgatccgcctgcctcggcctcccaaggtgccaagattacaggtgtgagccgatgcccccagcctatttttattttttgagacagagtctcactctgttgttcaggccggaggtcagtgatgtaatcatagctcactgcagccttgcttgacctcctgggcttaagggatcctcctccttcagcctctcctgtagttaggactataggtgggtaccatcacaacctcctaatttaaaatttttttttgtctcactgtgttgcccaagctggtcttgaatttttgacctcaagtaatcctcctgcctcagcctcccaaagtgttgggattacaggcatgagccactgtgcccagccctttaatagtttaaaatcaaagtttaagtagaaaacattattttatttggctcattggttagatgtaagtgatgtgaaatacttaaacatccattattgtttttaatataatttggaaaatatgagttgctttggattattacaacttcatttatttgtaccattgatgcataaattctcagtctaggttttagcgaagtctggattttaaaaaattgactgtgatattagttcaagtcttacgaacatcattattattattatttgagagacacagagtcttgctcagttgcccaggatggagtgcagctgcacaatcacagtttattgcagcctcaacctcctgggctcaagcagtcctcccacttcaacctcccgagtagctgggactataggcacacatcacaactcctggccaatttttgtattttttgtagagatggggtttcgccatgttttccaggctggtctcaaactcctgggctcaagcgatcctctttgcttagcctcccaaagtgctgggattacaggtgtgtgccaacacacctggccaagttgtatatactattaatctaggctatttctgacactgttgattttccttttccccttaggtgaggcaggcgactaatcagattgtgatgaattgtgctgatattgatattattacagcttcatatgcaccagaaggagatgaaggtaagagctgttttccattttaatttgctgtctgcatgtgcatatgtggggggtgtgtgtgtgtgtgtgtgtgtgagagagagagagagagacattttcaggttaagacttcagtgtttgttactttagaaatgggtaaattcagctgggtgaagtggctcacgcctataatcccagcactttgggaggctgaggcgagcagatccctgagcccatgagtttgagaccagcctgggccacatggcgaaacaaaaacaaacaaacaaacaaaaatattagctaggcatagtggtgcgtgcctgtagtcccagctatttgggaggctgaggtgggaggatctattgagcccaggtggccgaggctgcagtgagccatgactgcgccgctgcactccagcctgtgcgacagagtgagaccctgactcaaaaaaagaaaaagaaaaagggtaaaatgtttatgggaaatattgaatagtataacctaacagtattgtgaaataaatgtcacaatttattttacttttaaatttatttttatttttattttttttgagacagagtcttgctctgatgcccaggctggagtgcagtggcatcatctaagctcactgctatctctgcctcgtgagttcaagcagttctccctgcctcagcctcctgagtggctgagattacaggtgtccaccatcatacctagctaatttttgtatttttagtagagacagggttttgctatgttggccaggctggtcttgaactcctgatctcaggtgatctgcatgcctcccaaagtgctgggattacagatgtgagccaccacacccgggcaaatgtcacaattaaaattccacttccaagattaacttattttgtggtactagggaaatcatattttcataagtataaaatgaatataatacgcataataaagctgatgagttatttgaaaaattaagtactttgaacatgaaaggctcctcaaagaggcttcgtttttatgtttttcttaaagtttttttttctttttgtactatagtttaaaattgagataagtcatactcctaattcagagaaaaacatttgctttatgagacaatatgaagattagaagctaaataatggagttagttacaggggaagaacatgctaaaaagaaacatggtatagaatgtggaactcgattagtgtctataaaatgagaactgttttattttattttattttattttattttttatttttttttgagacggggtctcgctctgtcccccagcctggagtgcagtggcgcgatctcggctcactgcaagctccgcctcccgggttcacgccattctcctgcgtcaccctccggagtagctgggactacaggctcccgccaccacgcctggctaatttttttgtatttttagtagagacggggtttcaccgtgttagccaggatggtcttgatctcctgacctcgtgatccacccgcttcggcctcccaaagtgctgggattacaggcgtgagccaccgcgcccggccgagaactgttttagaccttataattttagtatgaaagtagtccgttttgactggaaatcttattcccgtatgagctgatttttaaatagataccaagtttggcataaactcttacaagtacatcagtattggagctggattgctttttacttttttttttttgagagagtctcgctctgtcacccaggctggggggcagtggcatgatctcaactaccacaacctctgtctcctggtctcaagccatcctcccacctcaccctcccaagtagctgatattacaggcgtgtaccaccatgcctggctaatattcgtatttgtatttttttatagatatggggggggtcttcctatattgcccaggctggtcttgaactcctgggctcaagggatccgacctcttcggcctcgcaggttgctgggattacaggcaagagccaccacacctggttgcctttttacttttgatttcacctagacattccttgtcaaaatggttattggttactctgagacttctttaataaaaaataatttaaggccgggcgcagtggctcacgcctgtaatcccagcactttgggaggcccaggtgggcggatcacaaggtcaggagatagagaccatcctggctaactcggcgaaaccctgtctctactaaaaatacaaaaaattagcctggcgtggtggcgggcgcctgtggtcccagctactcgggaggttgaggcaggagaatggcgtgaacccgggaggcggagcttgcagtgagccgagatcgcgccaccgcactccagcctgggcgacagagcgagactccgtctcaaaaaaaaaaaaaaataaataaataaaataaaataatttacacatttgatcttttaacttacattttatattttgatttcctctctcctttacattatactgaaaagaagtttcattttaaggcctcataacatttatgattttttcttaaactattttgtctataggaagtcaaagtagtagcagttgaacatactgttccgaagaagtacttaagttcaattgattgtaaattagatcaaactgctggaagaacagattcttcaaatggacttgaatgagtgccacttttaaaaaattgtctggtaaatgaaagagtgattatttaatttctttaactgtggagaaaaatagaagtactttagccaggtatatcaaagcaacaaggctttctttgttgcaggtagagaatgtttaaattcgatgtgtggttttaaagtggtatgtagataggtagatctagtaatataaatgtgtaccttccagctggcatggtttcagctcaagtttgttttttatcttcctgtactaaaaatgtcgggatagaattcaggtgactgaaaagttctttttttttttttttgagatggagtctagctctgtcgcccaacgatctcagcttgctgcaacctccacctctggggttcaagcaattcttctgcctcagcctcctgagtagctgggattacaggcgtgtgccaccacacccggctaatttttgtatttttagtagagatggggtttcaccatgtttgttaggctggtcttgaactcctggcctcgtgatccaccctcctcagcctcccaaagtgttgggattacaggcgtgagccaccgcgcccgacctgactgaaaagttttgaatatgtgtaaccgaatgttgctaagctcataatgatctgtatctcacggaagcccagttagtgttcttactaagagagtcaggagagaaatgaaaacttaatggaaaagaagatttgaagagagattctgataaaacattaaattattttagatacataatatatattcagtgctgggtgcagtggctcacgcctgtaatcccagtactttgggaggctgtggtgggtggatcatgacgtcagaagttcaagaccagcctggcgaagatggtgaaaccccatctctactaaaaataaaaaaattagctgggtgtggtggcgggtgcctgtaatcccagctactcaggaggctgaggcagagaattgcttgaacccaggaggcagaggttgcagtgagccaggatcgtgccactgcacgccagcctgggtgacagagactctgtctcaaaaaaaaaatattttccttcagaactagctaaggtacatttctcaacacttttctaccacagcaacaggaaaaaacctgaagtcatgtgtaagcccatgtaattttagagtttaagagaatgggaagttgtatgagttgttaaagtttgaattgggggcagccaggtgtggtggctcacacctataatcctagcattttgggagggctaggtgggcggatcacctgtggtcaggagtttgagaacagcctggccaacatggtgaaacaccgtctctactaaaaacacaaaaattagctgggcgtggtggcaggcacctgtaattccagctacttgggatgctgaaggcaggagaatcgcctgaacccgggaggtggaagttgcagtgagcggagattgtgccactgcacgccagcctgggcgacagagcaagactctgtctcaaaaaaaaaaaaaaaatagtttggattgggaacagggatagatttgggcttccacatgtatgtatgtgtgtgtgtgtgtgtgtgtgtgtgtgtgtatatatatatgtaataaaaaaagaagataaaagtaaaatcagaaaattacttttaaggcatgaaattgttgcttcttttaatttttttttttttttctttttgagatggagtcttcactctgtcgcccaggctggagtgcagtggcgcagtctcggctcactgcaagctctgcctcccgggttcacgccattctcctgcctcagcctccccagcagctggggctacaggcgcacgccgccacgcccagctaatttttgtatttttagtagagacgggattttaccgtattagccaggatggtctcgatctcctgaccttgtgctccgcccgcctcggcctcccaaagtgctgggattaaaggtgtgagccaccgtgcctggccaattgttgcttctttgtgtaagtttttatttgaagaaaaaggccatttttttgtgatatgtgcagtcatcctaaaagacctatgggcatgtgtctgtttttttttttttttttttttttgagatggagtcttgctgtattgcccaggctggagtacagtggcgcagtatcggctcactgcaactagtagaactttttttttttttttttaaagaacttgttttaaaataatccttaataggcttttattaactctgtttggatattagttatgtacccttttctctttgcaaaaatgaaaaatcatttcaagtagaaattaaaggtttgtttctcatccctttctttagatatagtaacagttataccagatatatatatatatatgtttttttgttttttttttttgagacagagtttcactcttgttgcccaggctggagtgcaatggcatgatcttgctcactgcaacctctgcctcccaggttcaagcaattctcctgcctcagcctcccgagtagctgggatcacaggtgtgcaccaccacgcccagctaatttttgtatttttagtagagacagggtttcaccatgttggccagcctggtctcgaactcgagacctcaggtgatccacctacctcggcctcccaaagtgctgggattacaggcatgagccaccacgcccggcccagttataccagatataagcaaatttgctagtagtttagatttctggaattgtgccaactacacatcaagagactatttagctttgttacagaagtcagtatcagtttcttgttataagacgagacctggttttacagacttttctatttctcaatggaactttactctgaagatatactcttccatttaaatactagttccaaaacctacattatatggtggctgcttaataaacatttaacattttggttaatttaaatcttgttgatgtgtatacatgaataactgggctaaaagcagatacctttgattattgtgaaacttcaagtaaatattgtgtgaaaaggaccccttctgtctcacaaattctggcccctcagctcattgtctgaacagtgattcccttgcatataataaattcccttggcttatatataataataaatgaagtttattatttatttgaactttttacccctgtaaataccaaggttctttttgcctaagtggtaatttgtgtcattcaaagagtttttattaaatattattattattatttgagatagagtctcactcttattgcccaggctggagtgcagtggcactatctcggctcactacagcctccgtctcctgggttgaagcgattcttgtgcctcagcctcccaagtcgctgggattacaggtgtgtgccaccaaacctggctaatttttaaatttttgtagagatggggtttccccattttggccaggctgctctcaaactgttgacgcccaccttggcctcccaaagtgctgggattacaggtgtgaaccactgcaccagaccttaaatactctgtttaagtgatagtttgataagtgtgaacgcaagtctgaaataggtttctttgcttgtgagaaagtataacgaattgccaagacaatagtgacaaacagagggcatatttttcaaagaggaagagtttatatagtgttaacattaagacaaaagtcttaagtttctaatttctgatcttgtttgttgggatttctttttttttttttttttttttgagacaggtctttctctgtcatccaggctggaatgcagtggcacagtcatggcttactgcagcctcctgggctcaagttactctcccaccacagcctcccggagagctgggatggcaggcatgtgccaccacacctggctaattttttaatttttgtagagatggggttttgcaatgttccccaggctggtctcagactccaagactcaagcagtcctcctacctcagcttcccaaagtgctgggattacagatatgagccactgtgcctggcccttgtttggatttctatgcttatctgtgaagtatattctggtttctatgcaggatagatccattctcaaataaacaacccttaagtatcattagttcaaactggagccaaataaatgtcagcattagaaggagcaagtgatagttagccagcccctttattcctttttagtgcaaatcagagataaagaacatgaagtttgcagtgtatttgcattctttcatttttacatttgttggttttgaataatattgaggggctgtctgataaagaacctgtgtaggtttccatatggctatatacaaagtatatgagcgtagaatagttttaaattttgtcttagttatacttggtaagttttaaaacgttatttaaatagccttaaggtgatatggattgctttagtgactgctgttttaggaatttagttggcttattgctgactatagagggaacgttttatcttctttttaacctccagttcaggttaggtgcctaaccaagtgaaacatttttcgtaatataatgtttaatagtgataattataaaaataatgatgagtttagtgtttactctataccaggcactaagtgcattacctgttcatatagagaacaaccgtaggcacagagagggtatctactttaggtaataaaactgataaatgttagagccaggattcaaacccaggcggtttggatctagggtccatgtacttgccactctattgcttgtcattaatgtaaccacaccatattgcaattatttgtttgtgtcatgtctgtactacttttcaatggaatcttaagatccttgaggggccgggcatggtagctcatggctgtaatcccagcactttgggaggccgaggcgggcggctcacctagggtcaggagttcaagaccagcctggccaacatggtgaaacctcgtctctactaaaaaaaaaagtacaaaaattagctgggtgtggtggtaggcgcctgtaatcctagctactcgggaggctgaggtgggagaattgcttgaacctgggaggcagaggttgcagtgagccaagatcacgccattgcactccagcctgggggacaagagacttctactcaaaaaaaaaaaaaaaaagatccagtaattatgattcattctttttcatttgtggttttccctggtatctgacatatagtagggatttaataaatatacattgaatgaaacgaagaaaatctagataaatggagtaagtctgtcatacagtagttcctccttatctatggcagatgtgttctaagacccccaatggtacgcctgaaaccacagatagtagcaaaacttatatatgctatgtttttccctatacatatgtactatgataaagtttaatttttacattagaaatagtaagaaattaacaaaagctaataaaaaatagaaccattataacaatatactgtaataaaagttacatgaatgttgtgtgcatctctctctcttttcttttttttgagactttgctctgtcgcccaggctggagtgcaatggtgcgatctcagctcactgcaatctctgcctcccaggttcaagcgattctcctgcctcagcctcctgagtagctgggactacaggcgcatgccaccacacccggctaattttttgtgtttttagtagagacggggtttcaccgtgttagccagaatggtctccatcttctgacctcgtgatctgcccgcctcggcctcccaaagtgctgggattacaggtgtgagccacaatatctttttttttttttgagatgcagtttcactcttgttgcccaggctggagtgcgatggtgtgatctcggctcactgcaaccactgcctcccgggtttaagcaagtctcctgcctcagcctcccaagtagctgggattacaggcatgcgccaccacgcctggctaattttgtatttttagtagggacagggtttctccatgttggtcagcctggtctcaaactcctgacctcaggtgatcttcccccctcagcctcgtaaagtgttgggattacaggcatgagccaccgcgcccagccaatatcttctttttaaaaaaaattatttcatttatttatttttagaggcagagtctctgttgcccaggttggagtgcagtggtgccatcatatctcactgcagcctcaaactgctgggctcaagtgatcctcctgcttcagcctcccagttagctaggactataggtatgcaccaacacacccagcaaatttgtaaaaattttttgtgagtcaggtctggctttattgctgaagttggtcttgaactcctggcttcaagcgatcctcctgcctcagcctcccaaagtgccaggattacaggcatgagccactgtgcccagcctctcttatagtatcttattgtattatactcactcttcttctttgacatttccaaactgctagcatcactactcttgtgctttgaggccattattaagtacaataaaggttacttaaacacaagccttgtgatacattgacagtcaatctgataactgagatggctactatgtgactaatgggctgggtggcatatatatacagcatggataggtcggagaaagggatgattcatgttctgggcagaatggaatgggagggcacaagatttcatcacactattcagaacagtacagtttaaaacttatgaattgtttgtttctggaattttccatttaatattttcagactgtagttgactctaggcaattgaaactgtggaaagtgaaactgcagataagggggacttgtcaggtctgcatttcttcatgtgctctatcctagtaactttatgggtaacaaaattatttcgtatttgagattattttgttaccagctttaacttgtattttacttccctttgaggactaccatcaagatacttactaattgtaaagattctttacagtattttaaatattaagaaaatggagagcataaaaaactgctgtaaattatgtagtttttgcattaaatgtagagaaaacactgattgcataatgttagtaacattgtagtgtatgctgttctttttttttttttttttgagatggagtttcgctcttattgcccaggctggagtgcaatggcatgatttcggctcgccgtaacctcagcctcccgggttcaagtgattctcctgcctcagcctcctgagtagctgggattacaggcatgcaccaccacagccggctaattttgtatttttagtagagatggagtttatccatgttggtcaggctggtctcgaacctccgaccacaggtgatccgcctgcctcagcctcccgcagtgctgggattacaggcacaagccgccgcgcccggccgtgtatgctgttcttaagtgtgaagctggaagagttagttgttctccaaatcaatgcttccttactttttttcaaggcattagtagaaactgatgttttcctggtacataaggaagaggaggctcacaactggagggtatcagagatctttcattgctctaggcctaccaggctggtccaagggccaagggaattattatcttgataaacctgtaatacatgtttggatctgccacagttagggaagctctgctatagtttcaagttaatagaattagaagggaagttaggtagtagtcagggctcattttatttatttgtgccttctgttttactttttttttttttttgaaatggagtcttgtgctggcgtgacctcggctcactacaacctctgcctcccgggttcaagcagttctcttgcctctgcctcccaagtagctgggactacagacgcaggccaccacgcccggctaatttttgtatttttagtagagatggggtttcccatgttggccaggctggtctcgaactcctgaccttgtgatccacctgccgtggtctcccaaagtgctgggattacaggcatgagccaccgcacccagcctgttttacttttttcttgatcccagatctttttcagttttcttgctttttttctcaaagaactaaccattgctttgtagacctcagttaactattatttccttattaacttctgcttcctttgggtttactttgcaaggtttttttttttttatttttgagacggagtcttactctgtcacgcaggctggagtgcagtggcgtgatcttggctcactgcaatccctgccttctggtttcaagtgattcttatgcctcagcctcctgatagctaggattaaaggcatgtgccaccacacccagctaatttttgtatttttagtagaggcggagttttaccatgttggtcaggctggtctcaaactcctgacctcaagtgatcggttcgccttggcctcccaaagtgctgggattacaggtgtgagccaccgctaccgtgcccggtctactttgcagatttaaaaaaacttctttaggctggtcccagtgcagtggtgtttataactcatcaatcatagccagttacagatttctttattcctccttcactcccactgcttcacttgactgcccttaaaaaaaaacaaaaaacaaacagaagtcttgagatggatgtttggcttattacttttcagtccttctttctattatattcatttaaatataaattttaatcctaaaaatgtactgcttttagctgcagcccacactttttttggtttgtttgttttgggggaaattctccaggcagtagttatggctgttgttgcttgctgctgcttctttcctatttttgttgatagctttgtgagagtacctgtaatgttgacatactataaagggtacatcttaaaatatgtaatttgataagttttctcatgaatgtaaccaggtaatgagcatattcatcaccctagaacatttcctcatgcccctttataatccttttctccccttttccttgctccttccccaggcaattatgatttgattccgtgttattttttttttgtacagagtctctgtcacccaggctggggtacagtggctctatctcaacttactgctacctccacctcccggcttaaagcaattcttgtgcctcagcctcccgagtagctgggacttcaggtgtacgccaccacacctggctcatttttgtgggtttttatttgtattaattaattaatttttatttatttatttagagatggagtctcgctctgctgcccaggctggggtgtagtggtgtgatctcggctcactgcaacctctgcctcccaggttcaagcagttctcctgcctcagcctcccaaatagctgggattacaggcttgtgccaccattcctggctaattttttctatttttagtagagatggggtttcaccatgttggccaggctggtcttgagctcctgacctcaagtgatccacatgcctcagcctccaaagtgctgggattacaggcatgagccaccacacctggcccaccccccacttttttttttgagacggagtctcgctctgtcacccatgctggagtgcagtggctagatctcggttcactgcagtctttgcctcctgggttcaagcaattctcctgtttcagcctcccaagtagctgggattacatgcgcctgccaccacgcctggctaatttttgtgtttttgtagagacggggtttcaccatgttggccaggctggtcttgaactcctgtcctcaggtgatctgcctgctttggcctcccgaagtgctggtattctaggcgtgagccaccatgcccggcctctttttttgttaagatagggtcttgcggttgggtgtggtggctgacgcttgtaatcccagcactttgggaggccgaggtgggtggatcacaaggtcaggagatcgagaccatcctggctaacatggtgaaaccctgtctctactaaaaatacaaaaaattagccgggcgtggtggcgcatgcctgtagtcccccctacctgagaggctgaggcaggagaattgcttgaacccgggaggcggacggaggttgcagtgaaccgagattgcgccattgcattccagcctggacaacagagcgagactccatctcaaaaaagagggaaaaaaaaaaaagacagggtcttgctctgtcacccaggccagagtgcagtgacaggatcgcagcttactgcaacctcaaactcctgaactcaagtgatcttcccacctcagcctcctgagtagctggaactacagatatacgctaccatggtgcctggctaattttttttagtagagatggggtcttgctttgttgcctaggctggtctcgaactcctggcttcaagggattctctcacctcagcctcccaaagtgttgggattacaggcatgagacaccgtgcctggcctgttttttcttattacatatttttgttctagaattaatttttccagatttgcttgttttctttgttttgcttggttttgggtttttttgggggttttgtttgtttgtttgtttttttaaagtaacttcgcgttacttgccaaatttttcaggattgggattttatatttttgaacatagtaagcaggtatatgaatagtttgctagtatctaggggagctttgttttgttccccgttggttactaatacttaaggttcatctttttccagtgtctgggcttcagatgttcagaagtttaatcacattccacttgtggactgcttttcttcttgttcatctttcctggtaggatatcacttttttggtttcaagcccaaaggagggggtcatttactcaagcttcttgtcttgtcttgtcttgtcttgtctcttctaatagagatagagtctcactgtgctacctagatagactatgttacttaaactcctgggcttaagcagtccttccacctcgcctcccaaaatgctgggattacagacacagtgcccacccagccacaaagcccccagtgttgatgggccctggatttccacttttgtccctggggcctatagcctcagcttccaaatctgctacatctctgctagatcagcaaatgaccccagagcaaaagtggcctagaatgcaaagcttcctctttatggaatttcatcctcttcttcatcttgatcaccttatcttgttctatgattcttttaaggagaagttttcccttccttccagcttttttagttttgtgggtgtcaagtaggagagagataattagtttgaattatatactcctctattacccaaatataaaatcctttaaaaaaaaaaaagataaactgagacctagacaaattaagtaaccgtgtaagaccacataatcaatggaaatcctggtccagaatcctgagtgattttaatgaaatagttcacagtcatttattaagagcaggggcaccctagaaggaattttttgattctgttgaaccagatttatatttggcacatgctcattctttttagactttttagatagcctaataggatagaaccatcactatgttatataaatgtgaaatccatttgaaaatatgggacctgtcagtataggtactgcttgaactgtaactatgcatatatctgattggcttttatgccctacggtgagaaggaggtcaccttgaagctttgcaaagtaagttcttggttccatttttcacttgaatcccccttggatatcctccagaatgatgtgttttctttcccattgcaacattattttcagctttgtggagaaacaaagtatgttccaagtagcaggtagtcactgtaggccttctttgaactgtgaactttatttttttgcacctgaactgctttctaaaaccacataaacaatatgatagggaagttgctatctgaataaaaaaacaaaataaaacctcacaatgtgtttgatctagtactgagctacactggtatatgtgggctatatagaattatgtggtttagattacttgtttaagtatagcagtggcttggaggaaaatacattctgagtttcaaatagataatttgtaaaggaaaatttgaagtacagttgacttggcacttctgatattgaaattttagaagattttatttctgtatctcaatgtaatgcctaggcagaatccactagatgcttgtatagatggtataagcaataatgatttcagctattttaaaaaatttcaatctttttttaatgttgcctcttgaaataccatcttgtacttctcattttccctatacctccttttatgtgattaagttttattatgtatagacataaagggggcctggcacagtggctcatgcctgcaatcccagcattttgggaggccaaggcacaaggattgcttgagcccaggagttcaagacaagcctacgcaatgcagtgagaccctgtctcaaacaaaaaaaaaaaaaaaaaaaaaaaaggttggggagggtgctatgatattatgatacatatgttggttttcatccacagtttctgtcatagaacacccatagtccctgttatttcctaagtgactaaaacaatatacatatattttattgaaatatttggccttttattcttggtttttgaagtggcttcagtacagcttcagatcaataaaagtgaaagatggtcttttgtaataacgttggggcactttaaacctcagaagcaggcttcagaaaacagaatcgctctctgaccttttcttgccttgcttttacctgctcctttttctccccaagcaggcaatagaaactaaaaatatactctgatcatcccccaacattctgtcttggagctgacagcaaagaaattatctgacctaccttgtctgattggaggtcataagacccccatttcagaaggcatcctgccctgtacttgggaggaaagaagttgcacagagaggccaagaagactctgaacagagaggccttgctaggtttccccactcagtctgttagcattaggtcctactttgtccaatcatatttctacccggttgtccatgcttcagtcgtgacggtccagtgaagtcctggaccgggtacagagagcttccagatagctgaacacgtggagggtcctggagggtggtgcacccagggagggtatgagagctctgcaccccttcccacatgccttgttctgtgcacctcttcatctgcattctttgtgctattctttataataaaccagtacacgtgttttcctgagttctgggcacagctttagcaaattaatcaaacctaagaagggggtcatgggaacactgacttgaagctggttggccagaagttctggatgaggcctggccttacaactagtgtctgaagtgggggcagtcttgtgagactgagccctctctcagcctgtgggatctaatgctatctccaggtagatagcatgagaattgaattggattagaaggtgctcagctggtggtatcttctgcagaactgattgcttcttgttggtggggagaaatccccacacatttggtcacagaagtctactgtgttgatgattgtggtgtaagagcagaggaaaagcaatttgatttttctccacaaggggaagaaaatgtttcatgattcaactaatgatttacctttcattgtaaggttatcatgctcaagtattaatgtaggaaggcttttttgatgcagagtgtgtgtgtgtgtgtgtgtgtatatacgtgtgtgtttgtagagggctaacattaaaaagggaaatgtaataaggaagaagaaatggtgttctaaacttaaaacccatttcatctgctaaatcgtcctagtgaaataccaactttagttaattttaaaaaaagtttagttaattgtaaaaaaaaaaagaatctcttcattatattttaaaaaccatttgtgtttcctttttctgtaatttattcatatttgtccattttaaatttcagtgttattcttattcttgttattgattttttaaaacgtggtctttatatttgagtgaaattaaccttccatcatgagttggagcattttttccccaatatatacttctcttttgattttgcttatggtcattttataatgccatggttttttttgttgtttgtttttttttttttttttttgagacggagtctcgctctctcagccaggctggagtgcagtggcgtgatctcagctcactgcaacctccacctccccgtttcaagcgattctcctgcctcagcctcccgagtagctgggattacaggcgtgcaccaccacgcctggctaatttttgtatgtttagtagtaatggagtttcaccatgttggacaggctggtctcagactcctgacctcaggtgatctgcccatcttgacctcccaaagtcctgggattacaggcatgagccaccatgcccagcctggtcatggttttatacatgctatgtttataatcaaattttacttctatttaatagatgactaacacacttacacatagatgcttatacccaaatatatatgtttatagattttaaaatgctaattatatttaaaaggcctaataaggagtttcagcaaaagctgttatatatatgtatataatggaccaattgcagttggatcaataaagaactgtaaggtgtgttatgatctagaaaagtgattcttttttttttttgagatggagtcttgctctgttgcccatgctggagtgcagtggcacgatctcggctcactgcaagctccgcctcccgagttcacgccattttcctgcctcagcctcctgggtagctgggactacaggcacgtgccaccacacccagctaattttttgtatttttagtagagacggggtttcaccatgttggccaggatggtctcgatctcttgacctcgtgatccgccctccttggcctccagaagtgctggtattacaggcgtgagccactgctcccggccctgaaaagtgtttcttaacaataactaggaactgtgctgtgtgttttatataagagtatattatataattttttttttctttgagatggagtctcactctgttgcccagactgagtgcagtggtgcgatctcagctcactgcagcctctacctcccaggttcaagcgattctcctgcctcagcctcccaagtagttgggattacaggcgcacgccaccatgccctgctaatttttgtatgtttagttttaccatgttggccaggctggactcaaactcctgacctcaagtgatcctcccacctcggtctcccaaagtgctgggattacaggtgtgagccaccgtgcctggcccccaatctttaattaagaagcaggtgccaggcacaatggtatactcctataatctcagctactcaggaggctgaggtgggaggattgccagtgcttgagcccgggagtttgagaccagcctgaacaacatagtgagacccttatctcaattttaaaaagaaagaattaggtaatgatatgattttaattttataggtgtggaaacggaggcttagagaattgaataatcatatataccttataagattctctcatactccatttttaaaagttttcgatcaagtttaagttgtattgatacacgatatatagtgaagtgtctatgtacaatgcttaatttacatatatatacatttccaattatgaatatattgcaaactgtattagtgaatgaattattcatttatcatatcagtattatatattactataatatataaatatactaattatatattagtattaatgtaaacattaatttagaaatacttttttctccagtgaagcctcctcagacttctcatatgcatcttcagtatttatgggtttctaccctttaaacaatctaacagttccagagcaaatattatcttctaagaggtttgagatagatccttatttgaatcagtatattatgttgtgactggaaattttatccctagccatgtctctattcacataacattagtaaatgtgatttttcattaatatatttcatatgagtagcattaatgatctccatgacataattacttagtctgttgcttttgaagtgattcattcattctacagatacttactgaacacacactatgtgccagaaactgctagcattggaagtagagctgtgaacaaaatcaagcatcaacatttctgatatttgagaagacaggcaacaagcaaatatgtgatgtaaagtagtgataagtgctgtaaaatcacaagagggtatagaatgaggattgttcttcaagttgatagaacagatctttaaagaagtgatttgaggctgggcgtggtggcttacacctgtaatcccaacactttgggaggccgaggcgggtggatcatgaggtcaagagactgagaccatcctggccaacgtgctgaaactccgtctctactaaaaatacaaaaattagccaggcgtggtggtgcgtgcctgtagtcccagctactcgggaggctgaggcagaagtgcttgaacccgggaggcggaggttgcagtgagccaagatcatgccactgcatgccagcctgggcgacagagcaagactccatctcaaaaaaaaaaaaagatgattcgaggcttcgtgtggtggttcatgcctgtaatccctgcactttgggaggctgaggcaggaggatcgcttgagctcgggagtttgaggccagcctgggcaacatggtgaaaccccatgtctataaaaaatacaaaaattagtcgggtgtgatggtgggcgcctgtagtcccagctatttgggaggctgaggtgggaggaacacttgaacctgagaggtcaaggttgcagtgagccaagatggcagcactgtactccaggttgggcaacagagtgagaccctgtctcaaaaaaaaaaaaaaaaaagtgatttgagcagaggcctgaatgacataaagtgtttagatatctggagactttgcaagcagatgcagaaaccctggggttggaaaatgcttacagtctgaatagtaaaagaggcaccaccagcatgacttctagttattgtgctacaccctgcacatttttttttctttttcgagacagggtctcactctgtcacctagatgggagtgcagtggcatgttcatggctcactccagcttcaacctcctaggcttcagcaatgctcttgcctcagcctttggagtagctgggaccacaggtttgtgtcaccacgtatgactaatttttttttatttttcctgtgttgcccaggttggttttgaactcctgggttcaggtgatcctcctgccttggcctcccaaagtgctgggattccaggcaagagccaccatgcctggccctgggcaacatttttattgtcagtcatttaatagcctagtctaatggatgtgtagtgatatgtcattgtgattttaatttgcctttccttaatggctaatgatgctgaacacttttttatgtgcttttttttttttgccatttataaattttcctttgtgaagtttaagtcttgccatttttaaattgggttgtttacctttttattcaacagctgtaggttttttgtttttttttttttgatacagagtctcactctgtctccaggctgtagtgcagtggcacatcttggctcactgcaacctccgttcccaggttcaagtgattctcctgcctcagcctcccaagtagctgagataacaggcatgcaccaccacgcatggtccacccacctcggcctcccaaagtgctgggattacaggcgtgagccactgcgcccagcccagaaaggaacattcttaagcattgaagtgattcttgtcaaatttgatttctattcaaatttaggagctgggccaggcacggtggctcagccctgtaatcccagcacttcgggaggctgaggtgggtagattgcctgaatccaggagtttgagaccaggctggacaacctggggaaacccctgtctctactaaaaatacaaaagattagatgggcctagtggcacctcacgcctgtagtccccagctaccccggaggctgaggtgggagaatctcccgaacctgatgggaaaggtagcagtgagttgagatagtgccactgtactccagcctgggcaacaaagtgagaccctgtctcaaaaaacaaaacaaaaccaaacaaatgtaggagctagcttgtgattgtagaaataattttggcaatagaagtgaaggaactgagttgtagtctagctagttaacatgtgacaaaccattaactttatatgtctcattttcttcatctgtaaaatgaggaagatttgattagaggatttattaaagttcttttaaaatctgaaattacagtttcttaattggttttgtagagattttggctttataaaaatgtgtgaaccatagtgacagcagaaacatttgaaatcctatatttgggtgattcataaaagaaaggaagaattatgggcatcttgcctgtaaaatgttatgtaatctgaatcattgttacccacagcatcctgtgactgataaaggtactcatggccacctctcctcccttgtctttctgtagtactttcctttctccccacctcaataatagctttattgatgtataattcacataccatacatgtcatctattaatatttaaagcatacaattcagcggtttttagtctatttacagagttgtacagccatcatcacaatcaattttagaacactttctgaactccagaaagaaagtaccctgcctatttcccctctatcacctagccctaggcaactatgaatctactttcagcctccatagattgccctgttatggacaaatatgtggctggtttcttagtataatgttttcaaggttatttacattgtagcatgtgtcagctatttcatttctttttattgtcaaataacattcagttgtatggatataccacattttatctattccatcagttgatggacatttgagttgttttcattttgggattattataaataatgctactatgaacatttgtatacaaacattatgtggacatgtgttttcatttctcttggacatatacttaggaatgggattgctgtatcacatgatacctctgtatttaaccttttgaggaattgccaaactgttttccaaaagtggctgcaccatttacattcccactatcaatatatgctccagtttctctacatcctaccttatactttttttttttttttctttttttgagacagagtctcgctctgtcgcccaggctggagtacagtggcacaatctcggctcactgcaacctccgcctcctgagttcaagcaattctaaattatcatgcctcagcctcccgcatagctggggttagaggcgtttgccaccatgcctggctaagttttatatttttagtaaaaatggggtttcgccatgttggccaggctgttctcgaactcttgacctcaggtgatccacacgcctcgtcctcccaaaatgctgggattataggtgtgagccaccatgtccggcctgattggccagcttttcatttggaatggggataggacatagttggaagttggtgtctttggttatttccctaacatgtccaagcatcctaaagtatcagtcaaataagcagtctcttctcattcctggcagagagtaagtcaaagccttaattcaatttgcatacctgttttcatgtaacaacaaataatttttttttttttgagacagagtttctctgttgttgtttaggctggagtgcaatgatgcgatcttggctcactgcaacctctgcctcccgggttcaagcgattctcctgccttagcctcccaagtagctgagattataggcatgcaccaccacagccggctagttttgtatttttagtagagacggggtttctccgtgttggtcaggctggtcttgaactcctgaccccaggtgacccgcctgcctcggcctcccaaagtgctgggattacaggcgtgagccaccacgcctggccacaacaaagaattttaccagaagtgggtatgatttatatcttagtttgaattgctacttacctttggggaacagacctttccttgatgtatctttaacactgaaatcttggcaagttgccaagtctcaaatgttcatgagtaagactgcaatatcacaatatcatagtcacacaggaatctgatagaaaagcatcacatttataaagccttctttcctgtacatcactgacattttgtgaattttaaagaatttgtaattatttttaaggagcatatttaatgtagttaatgtaacctagaataggctcatttgaaatgaaactcttgctaataggaacttaattcaccaaattaagaatatttagtttttgtagagattttgctcttgaaaatgttgcagtcttgatttcgtcttgtcagtccagtcagaattgtgaagtatttttttttctcattccagaaatacatgctacaggatttaactatcagaatgaagatgaaaaagtcaccttgtctttccctagtactctgcaaacaggtaagagacatagcttttgtaaaatctcgtgatgaatatagtgacatctgacttcctccagagaaatttattgtatgccattttttccctcgttgttattagcagattaagtattaagagctttttttttttttttactttgagacggagtcttactctattgcccaggctggagagtagtggcatgatcttggctcactacaacctccaccttccaggttcgagtgattctcctgcctcggcctcccgagtagctgggattacaggtgcctaccaccacaccggctaatttttttgtatttttagtagagacaaggtttcgccatgttggccaggctggtcaggctggtcttgaactcctgatctcaagcgatctgcccgccctggcctcccaaagtggtaggattacaggcaggagccaccgcgcccagctgtattaagagctttttaaagaggtttgttgcaacttttgggccaccagcatttccttctgcggaagttgggctacgaaaagcagggtttccacctcctgtcactctatattctctttaaacaaacaagccaagaaaaacaggacaaaaactaaagatcattctatcctagaatgtaatgtattgttttccagttttacctttttaaaaatacctttacctaggccaggcgtggtggctcacacctgcaatcctagcgctttgggaggccaaggcgggctgatcacttgaagccaggagttagggaccagcctggccaacatggcaaaaccccatctctaccaaaaaatacaaaaattacccagtgtggtggctcatccctataatcccagctactcagaaggctgaggcaagaaaatcgccagaagtcaggaagtggaggttgcagtgaaccgagatcatgccactgcactccagcctgggtgatagagtgggactctgtctaaaacaaacgaacaaaatacttttacctagctccatcttctattaattcaatccaaatccctgaagtgaatggtcacagatgattttgatatacaaccagagatcaaataggtattgtgttattgagggcacagaaagaaagatacgttgatatgttactattgttaggtataaaagcacaaagaaatagactttctgagcttagtatatgtggaagaaattatataccaatcaattggtgaagtactaagactttgatgaatgaacaaatgaaaaggaacagataattcaaaaggaagaaaatgtaaatgactaataaacatgtgaaaagatattgagcctcctagtaatgagaaatttttgcttctcatgtgagctgaaattttaaaaattcccaatgatatggctgccttgatatcgctggggggagtataaatccatgtaatttttttgtaaagcattctggcagtatatcaagagcctaaatatgttcatgtcctttgacccagcaattctgctaataggaatatatcccaaggaaaagtcataaatacagaaaatactttatgcccagaagtgtctgagatattacttacggtagtaaaaaattataattaatatatttgttcaacactaaggaaatgatcaagccaggaatgatatatctatatagtgaaatatacttagcaattaaaagtgaggtttgcgaattcttaaccctgtaaagtgcttattataatgtaaaattgaaaagaagaatataaaattacatatttaaggtggtgaatcatgtctctaaatggcacaaataaaatgataattatgtctgggtgttgacataattggtgatttttattcttatttatatcttttgtctgattttcacaattttcctactgagaatctattgaattaatataaaattatttttagaaaaaatttaaattggagatgtttagtcttttatttcagtgctcttggaggccctttatgtgtaattattataaaaataaatgggccgggcgtagtggctcacgcctgtaatcccagcactttgggaggccgaggcgggcggatcacgaggtcaggagatcgagaccatcctgactaacacggtgaaaccctgtctctactaaaaatacaaaaaattagctgggaatggtggcaggtgcctgtagtcccagctactcgggaggctgaggcaggagaatggcgtgaacccgggaggtggagcttgcagtgagccgagatcgcaccactgcactccagcctgggtggcagagtgagactccgtcccaaaaaacaaaacaaaacaaaacaaaaaatgctttgccatgaacatgtattaaaagctattgaagaatataatttgaaaaggaaggagattctttcgctgatttcttctacttccattgtctggtgaatctgtctagaaatattcctatgtatatataaatttatgtatataatttaacccacagataggatcacaaatctcagtggcttataaccactgagatttctttcttttttacacatgggccatgaggactgctgatcatatgcagccatatcaccaactctgctggctccacttggctcccaactgtctttccaggactagtagtcagcgagcagccactctctgtatcatgcatggcagagggcagaggctcagggatggggagaaagctagaccacaaagacacatttaaaacttctgcatggccaggcgtggtgactcacacctgtaatcccagcatttttggaggctgaggcaggaggattgcttgagcccaggagttcgagaccagcctaggcaatgtagtgagaccctgtctctataaaaaataaaataaaaaataaaatttctgtgtgatggtggtatacttgatgtctactcacatttcattgaccaaagcaagtagcatgaccaagcccaaagtcactggggtagcatttaacagacatttgcgaaaagtttctaatgaaagatagggcaaaaagcaaaattataagtataatagaaataaaggaagttggaaaaagcaaagacaaatctaaagaaagttaaaaaaaaaacaaacccatagctaattactatccttagagagttaagagaaagcattgcgtgcattaaacaaggacaggacagaatgccatcagataggaagaattacagcaggaaaacttggaaattatgataggtataaaaaacccagtaaaagtgttaaagatgaagttgaggaaacttccaagcagtagaaaaaacagatagaaaacagaaaaatagatttgagaaccagtccagcagaaccaacatccatctagtaaaacagaaagcagaggaaatgggaagaggattttttaattttcatttttgcaacagaatcttgctctgtcacccaggctggagtgcagtggtgcaatctcggctcaccacagcctccacctcgtgggttccagtgattctcctgcctcagcctcctgggtagctgagattacaggcacacaccaccacgcccagctgatttttgtatttttagtagagttggggtttcaccatgttggccaggctggtctcgaactccggaccttaggtgatgtgcccacttcggcctctcaaagtgctagggattacaggcgtgtgccactgtgcccggccagaagagaaactcaaaaagacaggaacatttccttgaactgatagagcaggagccttcagtttgcaaaggtacaccattgagagagactagcttaaaaaatgtaaaaattgccacactgactgaaattttagaacttctgcgataaagtaaaactcccagaaagttcctgtctgggatagggggcaataggagggaaggcaggtggcatactacctttaaaatttaggaatcagaatagtcctagacttaccattaggaacagtggaaacttagactctaatgaagctgttcattcaaaatacaaagtgaatctgattttcaacctaagattgcatgcttagcccaactttgaatttcggagtaaaaatattttcagatttgcaaggtcatagaaaatttgattctttgtaaaagatattggagtgggggatggattagctaaagcatgactttctacagtgaagagaaaatgtctaaagttgaaaaatgaagaaataggccgtggtcgtggctcatgcctgtaatcccaacactttgggaggctgaggtgggaggattgcttgcccaggaattgaaggctgcagtgagccgtgattgtaccactgccctcgagcctgggcgacagagcaagactgtctcaaagaaaggaaaagaaaaaatagctgtgtaagcaagacatttagaagtcacagagtttgaaattgattgcttctaggggcagggtgtggggagtagggcctagtgttgagcagggcctggagcttacgtattttaaactgtgaactattactttgatagaaatttaaaaaattttagagttttaaatctatatcattacagactatatatattctgtgtttacactgtgaaaaaattagaagtcaatagaaaaagagaaatgaaaaaaatccctttttatatatttgaaaaaattatacctctgaataattgagtcaaagaagacttgttatggaaattagaaaatatttagaactgaataatgaaattaccacatatgaaacattagggataaacatgtttcatatgcagataaaatattagaatatttagttaagaagaaagactgaaaattaattagctaagcattaaactcataaaaacaaaaggtaacttggagaaagtagaagaaagttttaagagcagaaacaaatgaaataagtgaagtgaggggcagaaatattaaaaaactgatatttaaaaatagtcccaaaagatatataaacctagccagtatagaaaataaaagcgtagattgaattgttgttcagcattaggaaatatggtaaccatttttcattaaatttaaaaagttaaacattctatatttatcaaaaggaatcagtttatttgctagaattcaccagggaagagtagacagaaacttctaacatgatagaagatatgtattacacacacacacacacacacacacacacacacgacataatctgtgccaagtactgttttaagtgcctcaaaaatattaatttatttagtcctttcaacaaccttttgaggtagatttgttttgtgacaaagtctctctgtcacccaggctggagtatagtggtgcagtcacggctcactgcagcctcaaactcctgggtttaagtgattctcccacttcagcctcccatgtagctaggactgcctacacatgacagtgcatctggttaatttttaaatttttttgtagagacagggtctcgttatgttgcctaggctggtctcaaatgcctggcctcaggtgatcctcctacctcagagagaggatcttgccatcctcccaaatgttgagattacaggcatgagccactacgccagccagattctgttacttctattttgtagataaactaaggcagaaaaatgatttcagtaacttaaataatttgtccaaggtaacatagctagtaagtaacatagctgggatttaaacccaagcagtttaactcaaaagtctgcacttttaaccaccacattgtgctatctttatttttcaaattaaatatttcaaaaacatagtacatttacataatttgaaattcaaatgctatgcaatgaaattttgtttgccagtctaccctgtcttctttctcagctccattcctcaacagaatgaaatgaaattttcctttcaaaactataccctgcttttgtaagcatttatatatatactttttaagaacacagaaatcaccatgccatacataatgttctgcacctttcttcttttccccttaactgtaaatattggaggccatttattactagtatataagagatgtatcattcttgataaggtctgtttacagcagacatgctaaatggtgaagctatttcaaataataacaaacaagttagagaaggttatgaccattagtatagtatgatttaacataatttttgatatttttggccaatataacaattttgagctaatataacaactgatataaatattagaacagaaaaattatcttgcaggtgtgacaatattgaattattattattattattttttgagatggagtctcgctctgtcgtccaggctggagtgcagtggcgcgatctcagctcactgcaagctctgcctcctgggttcatgccattctcctgtctcagcctcccgagtagctgggactacagctgcccgccaccacgcccggctaattttgtttttgtatttttagtagagatggggtttcactgtgttagccaggatggtcttgatctcctgacctcgtgatcctcccgcctcggcctcccaaagtgctggaattacaggtgtgagccatcacgcccagccgacaatattgaattattgaatatctgtttgaaaccattggctttcacattttcccaaggtttgctttaaaaatgaagttaatctttttcaagacagattgcacaagtgatctatctgataatgaagcaaatactgagcttatcttaggaggacattaataacctttgtgtttagcctcatcaaatttaacagtaatgcaagctattatacagctaagtaaaacctacttttctgaaattggcaccattctgggatagtgattaaattaccataattattgtaaggtctaacaaccttagaattagtggctgagggtcctgagggtggcatttatatggagaaacactggtagttgtcagcattttgaagagtcaaaaacaagataataaaaagtggtgacacatggcgaaaccctgtttctactaaaaacaaaaattagtcaggcctggtggcgcacgcctgtagttccagctactcaggaggctgaggcaggagaattgcttgaacccgggagccgaaggttgcagtgagccgagattgcaccactgcactttagcctgggtgacagactgagactgagactccattttccaaagaaaaaaagaggtggtgacacaaaggcaacgatctttattccctttttgtataaattaatctctttatttttatagcatttagtagactcattaaatttcttattattaaagtatttcaagatttactccaggttttacaattgttatactctcctaagctttaaacatttaaggtttttgatggaagtcccaatttttcagttgtttactttataaacgagcttgatgtatgtttcaaaaggtttacaaccccaaacataaatatttcatacattggatatgaaataaggtatctaatttgaggaagtggtgtaaattatgtgtgttgataggtataaaattagacaatttggcaatccgttcattaatatggtgtaaatttgataaatgaaatttattaaaaagtcattttttctcctacttgccctaaaattctactatatgaatagtaagtaaatactttgtaattggtatcatataatgtgacactaattaaacttattaatgatttttaaatactttaacttgtgttttgtttgaatttcaggtaataactctttccaatactttgtattttgtttagtatgccactttttggaagtggtcactgtcaatatcttgttatggtttgatggccttggagatttaaaaccgagtaaaagtgtaagcagtctttcttatttagttatgagttttaaaaccacttatgttccaactaggaaaaaatgcaagtagatttaccatgaaatatgaattatatttaaaaaacatcttaacagttgactgacttagtgaaacagactgggcaattccacttatggaattgtaacataaaattccatcatatagtttccattaaaggtagtaggtttttataatctgttagacgttctttgcaaactttattaatgtgaatacatttgcttttttaaaaaaattaagtgaacttctaaagaaaatagaaattaaaaatttttaatttaaattttgctttatagtttaattttttagtatcatttagaattatcaattattttactatatccatatatactgtcccagtaacctgtcattctctttaaagaaaaaagtattcattgtcctctttagatatttacaaatatctgatttctaaaaaataaacatcacaaatgtctattcaattaagcttcagttgagttgtttttttctcagaatgattaagaatatagcactttcattagtggtgactttgctctaaaggtctgaaattttcacttaaattactttcagaaccagtttgaggcatcaggctagagacagtttgtagtttgtcattcacttattctgtagactcgcactccccataacttttggtcctttccaaaagcaaattcaattttataagatgaagatttgactttgagatcattcaaaagagtgtcagaggggctgggcacagtggctcatgcctgtaatcccagcacttcgggaggccaaggtgggtggatcacttgaggccaggagtttaagaccagctggccaacatggcaaacccctgtctctactaaaaatgcaaaaattagccaggcgtggtggtgcccgcctgtagtcccagctactcaggaggctgaggcacaattgcttgaacccaggaggcggaggctgcagtgagccgagatcacaccactgtactccagcctgggcaacagagtgagcctctgtctcaaaaaaaaaaaagagagaaagagaaagtcacaacattttgaacaatgtcaaatgtcattgctctttagcgttccaaaatgacaatttgaaacattaggatataaaagtttggtatgattggttaattactttatagtcatgccctatctttgatttgttagacttcccatgctttaaatcttgatatacgtagggcctttaaaatggtcaactaaaaagtcaccattcctctacgttttttcgtgacttgatttgtaaaacacagaatgggattactgttttgccatgcatctgtatttagcagatgattactagataataattataattttttatgttataaaaaagaaagtatataaactcaaaaaagctcacttttttgtctaaattgtttttgctcttatacaatagaatacatatttaagttgtatttttatttgcatttaataatttattaattaaatgtatttctttgtcagatttcaaatgattgaggtgacttgtaagaatttgttttatgccctgttgctgatcaaatcattggtcttccctatagctccttacaaaattatgcaatcagtgttccatttggagtaaacatttagtgtcttatcttgatagagtaattggctacatttctctttctatgcatgaagttgtgtaaaaggaccaattcacatgtataattggcagagagcatgaattctggacttaacattttatcccattctcactacttactaattttatgacactggacaagttatttagcttctcagcctcagtttcctcatctgaaaaaatgaggacaatatctacttccaggtttataaatagttatatatattttaaaagcactgtgcacaatagcacatatcaggcatttaagaataaatgtttgtttcctttcctgttcttattttcacatattggtagtttgagactaagttaataactttttaggcagtcaccctaaacatgactttcaagagttattttaggattagtctgccttttactttagtaagtactgtattctctccattgccaggaggaatatttgaaaaaggaaggaatgatttgaacattgtaaatagctaactgaatatagtgtcttgaggacatatttttggtaactgtgtttaacatctccataaaagtgttttttatttatcttcaatcacaggtacaggaaccttaaagatagattttgttggagagctgaatgacaaaatgaaaggtttctatagaagtaagtatactaccccttctggagaggtgcgctatgctgctgtaacacagtttgaggtatgggttattcttctctaaaatattattattcttaaattaggcattctgacaaaggtgtgtttattatgtggggtgattatttgaggctaggtgcccttggccatgattgtattcacaattttagaatttttattttatatttagccattatctctatagaaaggagggaattaagggtatgggttggggaatgattatatacagttatacacacagacattcaaacacacgacacattttgatacctgaattgcctatatactgtgtacctttcttaaaatcattctcttagtatttgacacctatggcttttcctacagtattattagctgttttctagaattcctttccttctttgacatcttttgtttatcttactgtagtatctgtgctgtctttgattttttttctctctctctgtgtgtgtgtgtgtgtgtgtgtgtgtgtgtgtgtgtgtatacatatatatatacacacatatatatatttgctgtcctacgtaggccaggatgatttttatttgtcaggtatttgcaaattatataaattgttttgaatctgctagtcgtatttttaagtgttaaatctaattaaatttatttctataaatttcagtatggataaagaaacaattcatgatatccattcttatgtttctgcccatatccctatattgtttgcttgtttgggataacctaaaattttttatccagtttactactaatttgttttacctgatgtatcttctctttcaataattttatgttaccttctgtttagaataatatttgccacagatatttaggtttaattctgtgtttgaatgattccaatgcctttctctacccactttgaacacttcatcctggaatggttggctgatgtatgtctctaaacaattttttttttaggagaaggtatgtgggtaatgtaattcctaaacctttgcttttctgaaaaatctttcatttgcctttatacatgaccagatttactgggtatatagatttgttgatgaaaaaaggtaaaaagagcaacttttgacatccagaggttgtctggcactcacagctagcccgtgttattctccctattagacataatattacagaataccaactttagacaaggctacttgagaccataataaagtgagacaaaacaagggatccataattttgcctaggtacagtacatacaggatcactatgctacccgcaaaatatcaaacatctccatctctcagttaaaatgagtgactactgcttctttaccaattacggttttagatttgctctagtctggcctccgtatagataagatttattgagatacatacccatagaattgcctcataggacttcttgcagcactcaatctagagtgaatccctgtttacttagaccctcttccaaatcatgtaaaccaaatcccaaatcgtatagtgggttctttcttacattcttatggagacaccagtggttccctgtggtgtgagttctctcttgccatgagtaataggcccagctcattcaattgtaagagtagtacaatcagcttacaatttttcactttcaaaagtctgtgaatattgtttccaaagtcttctacatctcactttttcaagaggaggggtcacagactaaaatgtttcttcttcctttgtaggtaagatgttgtttcgttttgctttattttcttcctgcttgcttgttaaattatatcttgatatcgaaaattaaactgttttttaaaccaggtgttcacttttcattgatttttgcatagtacttggtgaaccctattgatttttagattcaggtaatttttcagtgtgaaagagtttttctgttatatcttcactgtgatatccattccattcccttctcagttaatactcagtttagctctagtatctgtctctcaaattatgtttaattgcttttatcactttgtcctttagatattttcaaacttaaatcttgttatctgtcattaatttcctttagtataaattcatttctctactgctgctgcttctaatttaaatgcttctgtgctgccatttctttccttatactctcccttcttttcagatgtcttttttattcattgatagaattcattatttatttaatgtttttgagaatgtagtcagccaagtttcttctacctctttggtttgtttgtttgtttgtttgttcgtttgtttgtttgttttttagtcggagccttgctctgtcgcccaggctggagtgcagtggtgcaatcttggctcactgcaacctccgcttcccaggttcgagccattctcctgcctcagcctcccgagtagctgggattacaggcatgtgtcaccatgcctggcttatttttgtatttttagtagagacggggtttcaccatgttgaccaggctggtctcgaactcctgacctcaggtgatccgcccacctcggcctcccaaagtgctggaattacaagcatgagccactgcacccagtctgttgtttctttttatgatacagtatcttgtcattggttccattttatttactaaataaatggaaaattctgtttactgaagtgtctttcctttataactgataccctgcagaacccctaagttttattttgctttcataaggttgctcttttttaaatttttaatgaaagagtaaggactcaagtaggtcaagtggcgacagttttatgtgtagcatatggaagtgccattaaatgaatgacctgtcttgaattgatagagcatctgtctttattcccattgctgccattccagataaagaacaaagcacatcaaagattgagaatatttttatttttaattcaaaaataaaagccagagaggcaacttaccatgttttcccaactttgaattcttatagcatactctttactgttctgtgctctgtgttgtgttaacattattgatttgaaggcatttgcattaaatttgaaatgttaaaatgtaaacaaaaatttagttgtaaataattataatatattgttaaaatccatagcagacactgttcctggatatttgctggaatggcagtggtagcaagtgttgtcttttctttctagttaatgcctagcttgttgcctggcactgaagagaaagtaaatatttgaacaagggaatgaatgaatgacagagggaaatggcgactgctttatgaaataacttgttaggttaattctaaggtatttatatttcatattcttttcttaaggctactgatgcccgaagggcttttccttgctgggatgagcctgctatcaaagcaacttttgatatctcattggttgttcctaaagacagagtagctttatcaaacatggtatgtatgtgtttataagtttatctaaaattttaataggctttagcagatttagtttgctgattagatgggataatatgaaaccacctaccacagtgctggtatattataggaacataaataatagttttctttattttcaataagcctctttttctttctttttttttttttctgtagagttggggtctcattatgttgcccaggctggtctcaaactcctggggtcaatctgtcttcctgcctcagcctcccaaagtgctgggattagaggcatgagccaccatgcccagccaagacctctttttcttgatagctttatttttggaggattttctccttgtcaaattccttgttaaatacatttataagattatctacttcttttaatttagagaggtaaattgacaagtttaatagatttatagtaactaaaagcaaaagtcttgggctggatatggtggcttacacctgtcatcccagcactttgggaagtcaaggtaggcagatcgcttgaggtcaggagttgaagaccagcctggccaacatggtgaaatcctgtccttactaaaaatacaaaaattatctgagtgtggttgcacacacctgtagtcccagctacttgggaggctgaggtgggaggatcacttgaacccaggaagcggaggttgtagtgagctgagatcacaccactgcactccagcctgggtgacagagccagaccctatctcagaaaaaaaaagaaaaaaaaaagaaaaaggtcttgacttattaaatgtcataagaaagccaggtacagtgactcttgcttgtaatctcagtgctttgggaggctaaggcaggaggattgcttgaggccaggagtttgacaccagtctgggcaacatagtgagacctcatttctacaaaagatttaaaacttaaaagttagccaggtatggtggcaggtgtctgtaatcctaactacttgggaggctaatgtgggaggatctctcgaacttaggagtttgaggctacagggagccatgattgcgccactgtattccagcctgggtgacagaacaagaccccatctcttaaaaaaaaaaaataggccaggcatggtggctcatacctgtaatcccagcacttcaggaggctgaggcaggtggatcatttgaggccaggagttcgagaccagcctggccaacatggtgaaaccccatctctactaaaaatacaaaaattagccagatatggtggcaggcacctgtaaccccagctacttgggaggctgaggcaggagaattgcttgaacctgggaggcggaggctgcagtgagttgagatcgcgccactccgctccagcctgggtgacagagcaagactccatctcggggggaaaaaaaaaaggttgcaacagagcaagaccctgtctctatctttttaaaaagttaaaaaaattcaaaagatgtagctgcataatgaagtatatttaggtttctggctgtttgtattcttggaatgtattctcttcaccagtgttattgatctcattcatgaacagggtaagcattccccacttgaagtgtgttgtctaggactgtcttgtgtggggaacttggaaaaacctgctgcacctgaaaataactcttttatgtatttactgggggagagcatcccataaatagaatgtcattctcttcacacatattcttagaagaggaggctaatacattaagcagaaatattcattcacactttagtatgagtgaatttatcagtgtgttcttgaataagtcttccttggaaggaagaatagagagagcttgaggaaatggagcctgaataggaaaaagagggagaacaccaaaggaaattagggactccaaaggtaaagttgaaatttcttcacaaataagcttagagccaactttggtagagaatgccctcgatctagaagtttgtatcctttgaaatgggagattctacaattatattatattttttttatttatttttgagaaggagtctcgctgtgtcgcccaggctggagtgcagtggtgtgatcccagctcactgcaagctccgcctccctggttcacgccattctcctgcctcagcctcccaagtagctgggattacaggcaccccccaccatgcctggctaatgttttgtatttttagtagagacggggtttcaccatgttagccaggatggtcttgatctcctgaccttgtgattcgcccgcctaagcctcccaaagtgctgggattacaggcgtgagccaccgcgcctggcccctattttatttttattaatagtcattttctcctaaacttatgtcagttgaaaagtatgaagcccttacttaaatcatcccaatgcctggcttataataagtattcgagaaaagtccattcctcttttctctcacaggtccttggtagttttaacacttcagcctccagcttcttagtatgagtgttttatcagaccactttccttcttaaagacagcataaaagcactggatgaattggggtagagaaataagccatgctagaatagaaagggggaaagagatgcaataaagcctacagtttttggctggtatttgctctatggtattaatgtaaacctatttaaatttttcttttttttctttcttaaagaatgtaattgaccggaaaccataccctgatgatgaaaatttagtggaagtgaagtttgcccgcacacctgttacatctacatatctggtggcatttgttgtgggtgaatatgactttgtagaaacaaggtcaaaagatggtgtgtgtgtctgtgtttacactcctgttggcaaagcagaacaaggaaaatttgcattagaggtaaatgtacttgaagaggattgttccagcagtccataactccaggttggggaatttacatttctggtcaattattagtacagttatttataatttaatctgaaagttgtgctacttggtttatttttaatagaatttaggaaatgccaaccttggtgtttcgttattttacaaaataataattaagagaatataagagtggaatttctctagggaatgggttggaaaatatgtagttatatttttcatatcaagttataaatggattaaagtttggccattgtattcaaagtttggagctaaggcagtcttcggaggtagggctccctgggattcatttctagtaatttaagatacattggcttgcaacaggattcctttgtgggtttcaatatgaattataataacatatttattagatggttattttgtttatacttttataggttgctgctaaaaccttgcctttttataaggactacttcaatgttccttatcctctacctaaaattgatctcattgctattgcagactttgcagctggtaaagtaaatttcattttattgctgaattgtaataactttttaaaattttgtgacttttgatgcaagagtatatatatatatatatatatatctcaataaatgtttatatttattttgtgaaggtgccatggagaactgggaccttgttacttataggtatgttaatgatgtattaccctgccttatcttttcaaatcactgatttcaaaagggcttccctcctaatcacagttgagtagcttctgctttacgatatggtgtaaatttttctaccttcccccacttccatgcacatttcaagaatgcagatggacacctctccctttggtgctactgtctgagggtgtaagattttaaagtgagcatctggcggtagtagcatttttagatatattcttggctaagtttctcattgcagtgcctttctttcctgccagtagtttcacagctatttatccagcttggagaaccttccctaatttcatatcttctagccaagtttttacatgtctgtcaccacaacataaacatgtgagttgaataacttttaaaagcagagtctgtctgtaaacaagtttttgccttctactttcaattgccttcttagatgagctaagtgttgaacggccggctcagtgctgtttttgggactatggaatgcatcttcctccaccactcccctcatttaatgaaaggactttcttctctctccatctagcacagtaatcgctaatcccttagacaatgttttcccaaaatttcaggcagctattctatcaacaaactgataattaaacttgtgtcacatctttgatattctgttgtattaattctgttggggtagtctttaatcttcgtgaaactttttctttccatattaggaaatattttcctaatatctctaaagcctaacttgtccatctgacttactgtctgaatcttcccaacttatgcatgcccacttttattgtttaaatttgtttctctttttttttttttaaacatagggagactgcattgcttattgatccaaaaaattcctgttcttcatcccgccagtgggttgctctggttgtgggacatgaacttgcccatcaatggtttggaaatcttgttactatggtatttaatatttttaagtgctcaaatatatttatcttcatcctactccacattattttggctacatagtatttcaagtttggctgcaacactgtgccaaaaaataattgagtgatagaaaagtattattttaaaaggtccactttgaaagggcttatcagaatctctgcattgaacaagggcatatggacagtctttattcaacagacacttcctaaactgttctaaaatttgtctgcaaatgggaaaagtcaagatactaatttgggtgagaggaaaagattcctcttaggtgtagatgaatgaatcatgcagtgagattccaggctaactgtagtttcttgaatcttatttgttaatctgactcacagctgaaaagtaacctgatgaataacagactgatctttaattagagagaaatgtttttaggagtcagttttttcattgcctaaaatgttaagttgaaatttaatgaaataaaagtaaacaaactgcagagtgactgcagaataaagctgtattaaaattccagctgttctgttgaaatccttataatgtttgcagtaatgatctctgtccttcagtcctgatttttcactcttactctaagtaaatactatttatgaatgccaactgtgttagagcttgggagcacaggatttaataagtgaactagatgtacctctgcaattaaataactggatattctggagccagctagattccctgacattttaggctgccaaagagcagaacctgatttgaatgtagattgagtccatacgttatataaataagaatgtaagacatttatcaactgttacgtgtctcagagagtttctacagaaagtcaacccttgaaaataaatcttttccttttattttggatgtttaaaattttacaggtgaaaaaaattctttgaaatataatttcaggccgggcacggtagctcacgccagtaatcccagcactttgggaggccgaggcgggtggatcacttgaggtcacgtgtttgagaccaccctgaccaatgttgcgaaactccatctccactaaaaaaaaaatagaaaattagctgggcgtggtggtatgcacctgtaatcctagctactctggaggttgaggcagaagaatcgcttgaacctgggaggcagaggttgcagtgagccgagatcacgccactgcactccagcctgggcaacaagagcgaaactccatctcaaaaaaaaaaaaaaaaagaaatataatttcatgtggaactatgtgttggtgcctgtattcaaatatgtgaagaaatggccttttcttctaatgcagcgagtttgctactttgtaccaaataatttttttgcttggctttgagataactttatgattttattttgaaactacaagcaataaattttagtaggggaaatgtgtacattcttattaaacaactttttactggttttatgtaactattctagttattagaactgaaattccaagggcttagggataggttggaaaataagtttcattttatgctagtttattttaggaagctactaggcaaatagccacttatcacttaatatcaaaataatttttttttaagacagagtctcactctgtcagttaaactggagtgcaatggcacaatcatggttcattacagtcttgacctctgggctcaagcaatcctcctgtctctgcctcctgagtagctgcaattacaggtgtgtggcaccatgcccagcttatttttgcactttttgtagagacaaggtttcactgtattgccttttgtagagacagggtttcactttgttgcctaaactggtctcaaactcctgggctcaagcaatcctcccacctcagcctcccaaagtgctgggattacaggcatgagctaccacacctggccttttctggggggactggttggggatggagaataggatctcactttgttacccaagccggagtgcagtggcacaatcatgggtcagtgcagcttcatcttcctgggcttatgtaatcctcttgcctcagcctcccaagtagctgggaccacaggtgtgtgtcaccatgaccagctaatttttttttactttttaatttttttagagatggagtctcactgtgttacccaggcttatctcaaactcctgggctcaagtgatcttcctgccttgacctcccagagtattggcattacaggagcaagccattgtgcctggcctgctttctttcactaataggcttaatcaactttaataaaatttagattaagatctttaaaattttttaaaaactgattttatctgtcactcatattctttgtccattccatttactatgcattcttatttaacaggtgataatttcatattccataagtgcttaaacaccattcattactgaactacatttttgtttaatttcacataatttttatataagcagtactctttctcagtttctcttgaacattcaactcattagtgagtggttttccccagtcatttccatttttctttatttggctctgatagttttctgtttttgtttttcagagataatcctttactatactaaattctacgtgattatattttccacctctatttgcctatatttatctgctgtcttttccttttccatatatgggcttattttttttttccctcttcttccttttctacctttggtatttaaaaagttacttaggactgagtgcactggcttacgtgtgtaatcccagcactttggcaggctgaggcgggaggattgcttgagccccggtgttcaaggctgcagtgagctacgatggtgcccctgccactccagcctgggcaacagaatgagaccctgtctgggtttgggggagaagttatttacaatgttttgaaaatatcctttggcccaggcatggtggctcacacctgtaatcccagcactttgggaggccgaggcaggtggatcacttgaggtcagaagtttgagaccagcctggccaacatggcaaaaccccatctctactaaaaatacaaaaattagccaggcatagtgatacatgcctgtaatcccagctactggtgaacactccagcctggtgacaaaacaagactttgtctcaaaaaaaaaaaaaaaaaaaaaaaaaaagaaaggaaaagaaaatgaccctcagatataattctaatatcaccagttggcctttcttgacatctcttttagtcttctctctttttcagaaatgtgagttctttgcgaaatgttttgaactgaattttaggtcattaaattgtgagttttggaatatagtggaagggacatgtgagtgttttagattagtagaatgacaatcatttcaatttctttaagtattttcatcttctgtttttaggaatggtggactcatctttggttaaatgaaggttttgcatcctggattgaatatctgtgtgtagaccactgcttcccagagtatgatatttggactcagtttgtttctgctgattacacccgtgcccaggagcttgacgccttagataacagccatcctattgaagtgagccatactttctaaccattagcctatgactgctctcatttacaatgaaatacgtaatttgttacatagatactttggactttgaaaagaagagaaaatagcatgggtgattttactggttcatatttctagtcttgaaaagctagtaagtctaagttctaattaaacatttcttttaaaggtaggcagtaaaaaaaaattggtctggccaggcgcagtggcttacgcctgtaatcctagcattttgggaggctgaggcgggtggatcacctgaggtcgggagtttgagaccagcctgaccaacatggagaaaccccgtctttactaaaaatacaaaattagctgggcacggtggcgcatgcctgtaatcccagctactcgggaggctgaggcaggagaatcacttgaacctgggaggcagaggttgcggtgagccgagatcgtgccattgcactccagcctgggcaacaagagcaaaaaactctgccaaaaaaaagaaaaagagtagtatgggagaagtcatacctattgggtaacactatggttccattgtttatgtcaaggaaaattctggacatattttattgtcagggtctgttttgtgaatactttaattctcttgacttagcctatccctacttcagtttatatatataaattttgtatctaaagaactagagttataatcctacttcaacatatttaattaggctcccatataattgtaattcattacaattagtgcaagaaatctaatgttcttcacctccatgtcttcctcatcactcctctgcaactaccccaaaaataaacagaaccatagtggcttctttcccagcagaacaaagccaggactggaacccaagctctaagggatgacaggaatcatgttctattcaactttattattattagttactacatttttttgaggaccatcgttatacattatgagtgagttaaaggcagaaaaatgtaagttagaagggttttcctagaaagcgttttatgtaattcagtattacaggctatctgcttcctgtcataaccctgaatcacactgtctgccaggtcagtgtgggccatccatctgaggttgatgagatatttgatgctatatcatatagcaaaggtgcatctgtcatccgaatgctgcatgactacattggggataaggtaaaaaaaaaaaactttaagtatttcattctttcatggtgaaatcataagagttttgcatgaaaaaaagtctcactttatttggattaagttcccaaatagtttctggcttgtcattttttttaatgaccaaaaagaatgagaattcaattatttgaagttgactactgtggtctctcagatgagtgatgtgcaggtgtgtttgggagtggaaatgggaggctgttataaaacttaagagcaagaatagaaggcatagagtacgcattattaaataaaaggcagtaggcatcagaaggatatatgtgtttcagtgtatctgatacttgagtatttgagtaaatttgtttttgattactaatatacaaatatactataaattctgagatctgacttccctggattttaaaaattgtgttttctcaggactttaagaaaggaatgaacatgtatttaaccaagttccaacaaaagaatgctgccgcaggtaatctttaatagcttgagatagaaatggagagaaagtattgtcactctatccaggctgggacattttatttttgttctgaatacttaactcaaggtcaggatccatgtaataaataaattagccttatttgaagctgtgttcaggttgaatatctctaatctgaaatttgaaatgctccagaatctgaaactttttcttttctttctttctttttttttaattaaagttctagggtgcatgtgcacaatgtgcaggtttgttacatcagtatacatgtgccatgttggtttgctgcacccattaactcgtcatttacattaggtatttctcctaatgctatccctcccccagccccctaccccatgacaggccctggtgtctgatgttccccgccctgtgttcaagtgttctcattgttcaattcccacccaaaatctgaaactttttgagtgccaacgtgatgctcaaaggaaatgctcattggaacattttagattttggatattgcaattatagatgctcagctagtaagtataatgcaaatattccaaaatccaaaagaaatatgaaattcaaaacatttctggtcccaagcattttggataagggacactcaacctgcagtaagtcatagggtcaacatgaatcaggactcattatccctttggtcatcctccagcattctgctttccataactgaatattttgccaacttaaagagtctgggccgggtgtggtggctcacgcctgtaatcctagcactttgggaggccaggatgtgaggactgattgagcccaggagttcaagaccagcttgcaacatagcgagaccccacctctacaaaaaatacaaaaatattagccgggtgtggtggtatgtgcctgtagtcccagctactcaggaggctgaagtgggaagggtcacttgagcccaggagtttgaggttacagtgagcaatcgtggcaccactgcactccagcctgggcaacagaacaagatcctgtctctgaaaaaataaaaaatcaagggaatagtcatgtgttgcttaacaacagggatatgttctgagaaatatgttgtcaggcaatttcatcaatatgtgaacatcatagaatgtacttacagaaacctacacagtatgtcctaggctatatacacctagcctacatggtatataccctgttgctcctaggctacaaaatacctgtacagcatgttactgtactgaataccataggcaattataacacaatagtatttgtatacctgaacatttctcaatatagaaaagttacagtaaaaatatgatattaaagatgctccatcagctggctgatatgcctataatccgagcactttgggaggctggggcaggtggactgcttgagtccaggagtttgataccagcctgggcaccatgccaatacctcgtctctataaaaagtacaaaaattagctgggtgtggtggcatgtgcctgtagtcccagctacttgggaggctgaggtaggaggatcatagtttcaaagtgtggcacttactggttctccactcactccctcctgccgtcttgtgaagaaggtgcctgcttccccttccccttcttccatgattgtaagtttccggaactgcaagtcaattaagcctgtttcctttataaattacccaatctcaggtatttctttacatcagtgtgaaaacaaatgaatacagtccccttccctgaggtgccttctccttaggcaaccagctgcccccatgctcctcttctgcccccctggtatttcctttcccctcatgaggcccaagtgatccacatggccagccacagccccatcctactgcaggcctgtgtggctgctagagaggccaggctcctttccgcaccccgaggctgcccgatatgctttctgcatcctgtagaaaactgacccactattctcatactggtgcaacttcttccattacctcaaaactggacaacgtgaacttgtttcttgtctcttcttgctagggctgtcactgggacagtccgagatgcgggggtggggggagacaatggatgaatggatggatgaatggacagtagtccagggagatgtccctgtgtgtcctgaactgggaccttcctccaatgagaagccttcctgagtgagtttatacagtcatcccttggtatccatggattagttctagggtccccggggatgccaaaatccatggatcctcaagtctctgacataacatggcctagtatttacatatcagctatgcacatcctcccgtagacattagaccatccctggattattcatgatgtgtaatacaatgcagatgctacataaatgatcgtgatactggattctttagggaataatgacaagaacaaactctgcacatgttcaatagaaacataaccgtccaatttattttctgaatattttccatctgctgttgctgaatctacagatgcagagctcctggatacgagagccaagtgtgctttgagagtagggtgggtgaggttgctaatgagtacaggggagcaggtgttgatcaggaggaccctgcactggggcatctggacgtcctgcctcaggacttgagactccagttggatggcacaggcagactcagcccaggtcaaagccgtccccttgaagtttctttttatcccaagctctttctggcccctggaatttggcatcccctaggccctgtgtggaaggacagatgaaccaggttttagataacatgtctagaagagtgagcccctactgtgtgcccggcactttccccacaggatcctctagctagaatatccaagggtcatggagagaaatacccagttaaaatatcagaaatgaaaaagcgataccattagagacactaaaaagaccattaggtaatagtactagcttttgtattctgagatccaacagcagcagtcacttccctccacccctatgtgtatcccaggaccaccctgggcagggagggctgaggttagggagcagccatggatgctctgatgctggccctgggcctcgggggtgacagtgatgaggaactgggtgcacacatgagtggggcagccgggcctggccagagaagcagcacacaacgtgcacagatgtgtttacccacatacacatgtgcacgcacgtgcacaaacacattgcaggcaggcatgttgacgcctcaggcagcggaggaccctgactctgggcactgctgacccgggcaaggccccactgtgattcgtgccatgacctcagaatgtcactggtgcttagcacctatctgctctctggtctgcctcagtggtctacagcagttacacacaggcagtggtatctgtgagcagctctgtggactcaaaggttttctccctgagaggcatgacccaggccagctgattcatcagaatcaggtgagcgtgacctgctctcttccctccaggcggacttgggggcagtggctacggtgcgggcggtgttggcctctgtggggcagctaccgaggagggtcatccctgagcactcaccaggcgcccgttctacactgcccgtgtagacgattggctctttcgtctccatggtggcttcgtagagtgggtgctgttcccaaatgtccccattcgacagatgagacgtctggggtcagagaggcagtaaccggcctgggaatccggacatgatcctgagttttgctctcagccctgccgtgtgctgtgctggaattcaggcctgaaccctgtgacctccctgccctagatcccaaatctgcccaggtttcccatcccgatggggcagagcctggtcctggcagagccactggtatagagccactggtacagatccactgacggtcctcagaacacctctgtgccctaagctgggtcctgatggtcgctgtgggccccactgaacacacatggtcccttgtccgggggagcctgctgcccttgggcagctgtggaaaatgaaggagccctggagggctggctgaggggagactatcttcccttgtgttcaaaggggtccgggcactagggttctccccaggtatttcttgctctgcgtggtcctcttgaggcctcgccctccttttgcctcgagtattcccaggagggacggtccatccagctgttctccaggaccaaggacccactgttcttcctcagtgacccaggaaaatgaagcctcctcctgttgggacggctcagaatggtggactccacagtccctccgcgagagacgtggtttccatgcgtacaatagatctttctcatcccccaaacccaacaccctcctgctcaacaggcgttattcctaaagtggcttcactgttcagactgaagagccacggtagccaaagtgatgagcggagtagaaccgagcagtcgggagagatcttgttccctgtaggaaactgggcatcgctgaggccctgagcatcccaggaggccgattgcacagagacctctggtcgctgaccccagtctgcctccacatccctggaatagcccatcatgggcccttcacccttggcaggtggaaaccattcaacctgctggggccggtgtgtccccatttcatggcattgggggacaacaggattctctgtctaggtcccactgtactcaagtccttgggaagatgcccacccctgcttgggacttgagactccagagactggagcagctgtgggccactgggtctggcccctttttccctgggggcggcggtggaatgggggttacgcagccagccagcatctgggagcccggcgagagcggttcaggtgttctccgaagccgccgcgtacggtgtgacctttagacaattctgtctcacaggatggacgtggtagaggtcgcgggcagttggtgggcacaagagcgagaggacatcattatgaaatacgaaaaggtacaagtcggtctgcttcttggagggaggcctcttccagtgtgccctggtcaaagggtcctgggctccctaggagcacagggcagggacgggtggccaatgcccccaggcccttgcaccctttaccttggacccctcaccaaggctccctctgggctacagggacaccgagctgggctgccagaggacaaggggcctaagccttttcgaagctacaacaacaacgtcgatcatttggggattgtacagtgagtcctctgcactcccctcacccctaaagcacctgtctcagctcagggatgggtttgcttttagaaaggcctttctgacgcaggacatgtctcaccaggtcgggtcaacctcctttccagggacagaactcctccctgactcccctgcaggtccagcccgaggttgttaggccagaggtgtggggcccatctagggagccggtgggaatggagactgggctaggtcaggcccctgggcgctcagcagttctgtcggcaagtgagcacaagaggagcggggcagcctgagggtctggccctgtctacttggagacaaccccggtgagatgcaagggttatggccacagggtgaggggacgcctggcccagcctcagggctgttgtccagcaggtctctgagggcccacctgcccctgttctcccccattcccctagagctacagccctcactgtcccgtgaggggaaaaggcatggtgacaatgggggctgtagccctaggagaacgggggagaagatgggcagggccccgttctgggcatctcacggtgaggccagggaggcagcagggctcgcggctaaagacctgggtctggtgctgggaagggatctggggccgggtaagaggagcccagccaggagcccatccctcagggatcacaggatggagagacagaggatccctggggaggtagggcgggagggagctgacgagccgtgccacttctgaaacgcagggtgtgtggctcgggtgcagggagaggcaggtggatgctgggaggtcagaacctgcaagggccttggggctgtcaagtggggtgggcccctggtgcagccagagtacaccgggcaggtctcagggcaggctcccttgaccctggcggggggatgtggtcactccctgagggactcctgtcagggcccggtcgcccaccctgggcggcccccatcccatctcagggctaacctttctcagctccagcagaaagcaccacctcgagtccaggacgggcagccccattgggcagcctgaccgccccccacgccaggggccccagtaaccccggccaggctgtccctacactccttcttctcccaggtcctgcccctcctgggagtcagccccacaggaaggcccttgtcctcccttccctgtgccttctcctgggctgagccctgagctggaaagggacagagccagtcctttctgggggtcggcacccaggctggggccgctccaggccccgtgcagttcctcagctctgcctgggttgccttacagtgagacggagctgcctcctctgactgcgcgggaggcgaaggtaagagcctgatgcgtggaggggctggtccagggacgtagggactgggcgggtggtcagtgaggcagaggaagcagctggcctgagcggtggcgggtgagggcaacacgctgtcactgggaggggcagcagtccctgctggacctgaccccaggttgctgttcactttggcagtttgataaaattccaaaaggagaaccacagtcctggcttgggggtggctgcgcgcttgtgtcaggaccccacctagaggctgggacctaagactggtgtgtctgtggcctgaggatggtacatcccggggtcccaaagccagcccactggtgctcatttgctcaaaggctctcagcccttgaggtctgcccttccctggctccttccagctggctcccaccagggctccagagcccaagacccagcatccgcgggcggctctgggaagcctggcagctccgctaactccaacatgcctcatttgacagcaaattcggcgggagatcagccgaaagagcaagtgggtggatatgctgggagactgggagaaatacaaaagcagcagaaaggtaacgtgtggagggaggaagcactctctgcagagacaggggacaggcacccatggctgtggcctggcaccatcagcctctcagagggtgggcggcacactgtcctcgcccagaggactgcaggcctggtcgccagatttcctgcctattcgtgcaagcgtcaccttgcagggagggaatctgaatctagggctgggactacccggagctcaaggctagggatgccctggtgacctgaaggaaggaaaaggttcagatcagagtttcgactctgagtgtccatccactctttcagtcctgggaagggagaccctgtcccagcttgatctcacctctactgaggaatcatggggccaaaaccgacaatttccagaatccccgggctctggtcctcactggggtcaccccgtggcctgtgacaccagatcgttttctgcccacagctcatagatcaagcgtacaagggaatgcccatgaacatccggggcccgatgtggtcagtcctcctgaacactgaggaaatgaagttgaaaaaccccggaagataccaggtacgctcagccagagcacaacaaacaggacaggccgtgtcggggcccaggtctccagctggagggaacgtcaagaccaccctggggagctgggggtgaaggtcagatgaacaccctgggcacagatggtgacacagtcaccacagacaaactcagctctggtgaccctccctggcttcagtaacaagccaaaatgcagctttctgcagaaggaaaccttccttctgtccttccttcccgaagtgctgactgtgggctgactgccactgggggcagggagtcttccatctgttctgagactgcttcctcctcttggccctgccctacagatcatgaaggagaagggcaagaagtcatctgagcacatccagcgcatcgaccgggacgtaagcgggacattaaggaagcatatattcttcagggatcgatacggaaccaagtaagcctacgggagccacagggtcccagcagagatggggtgaatgagagggatgggggcttccccggagcagaagccagggtcacccaggagggatgacacagctgccaagagctctcccggcccagggagcagccggcaccatgaaccgagcacctccctggttccaagccctgggccagactggaacatgtggggccagaacccaggaggatcctgaggagatggaaggcagcaaacaaaatcatgcacaatggtgaagggtgctctccctgacccatggggacccatggtaggacccatgggagggtggcaggatagagggcccatgagcccccgccaggcaacagtgacagcaccaaatgctgggagaattaggggtcctggaaactctcatccaggtccgctgggaacatgacatggcacagccacgttggcagcccgttgggcagtggctcacaaagctcgatggacttgaaccacacatccccaaagtgtcacagatattgaacccactgatttgcaaactgacatccacatgaaaccagcatgccaggttcactgcttgactcctcgtcactcacacacggagccttcggggacggccttcaacacggggatggggagagcaaggctggtcctcccttcaaacggaagacccagtgagaaaagggaacgagccggtgatgcccgcacgaacgtgggtggatcctagatgcattttgctgagggacagaagccagacccaataagctaccacagtaggattcccattcctaggccattctggaaaaggccaaaccacagggactgagaagcagtctgggtggccaggggctgacggatcggggagaggctgggtgcataggggccaccctggagacttggaggatgaaggagtcgccccaggaggggctggagcggtggccgggagactctgcacattggtttggaaccgtggaggaactgtacacccacagactgaactggcgtgtgtgcaaactgaaaaaaaaaaaaaaaaatcattcagagtgaaaaggatcaggcaagtcactgtacaactgggctatttgcatgtcacagatgtggattttactgaaacatttcttcaagggtctcaggccctgaagagctcactgcttatctggtgaaacatctgaacctgaaatgggatttgctgttaggctttgtagacaaagtgaaattaacaacatctgcacaaaacaaaccaaagccccctttctctgtttcctaggcagcgggaactactccacatcctcctggcatatgaggagtacaacccggtgagtattcccggcagtgaggttcccgggccatatttccatattgacaggagtgggtgtctggtgggggtgtcgttgcttcttttaaagttagtatttgtgacccaccaggatataggaggtaggatgtcagctcaccgctggcataaacctccaaggaagggggtggtctcaaggggtcaagctgagacacaaaggagtcagggcctggactcctggtgtcacctgggcctgaccaccacttctcagaacaagaaatgacgccctcctcctggggctgccccaaagcccaggagcttggcagcatcgcacacaggatggtgctatcagcagacattttggacaaggtgctgaagtgcctgatggacttggctcttgtcatgaaatgaatgtgcatcctgaggaagcctctttttcagaggaagcctctccttcagaggaagcctctccagtcacctctgccctctccaatgacatgagtcctcccaggtgacctcagccctcccaggtgatgtccttccatggtgactctggctcttgcaggaggtgggctactgcagggacctgagccacatcgccgccttgttcctcctctatcttcctgaggaggatgcattctgggcactggtgcagctgctggccagtgagaggcactccctgcagggttagtgaacagctgccccggggacctcctgcagccagacctggggatggccaccctggccaggtgatcacagctttcagccaaggcaccctccttgtgtcgccagcttgttgggagactttaggatgtctctgctgagggtcccacaggagtccacggctgacccccaaagcccaaatcagacgcctctcatccccatcagcagagggcatctcatcctccccgtggccaccctctgtgtcctggagccacgccctccggctctgattctgtgcagctgactctcccctccctgagagtcctcctgccctccagctgcccgggctcctgctgccatcggtgcccacgaatgggccgaccaagcccaggtggcagcatctccccatcccctgttccccggcccgaccccactaccaggagatgaccgggaagcccagcgcccacccagttccggccaccctgtcgtggcctgaaagtcaggcttgccctttttgcaccctggcccaggaggcctccaggggaacctccagccaggctccagggaatgttcccgccccacctccccagggtaaaggccgcatgttggggtcaccagacgggagggtgggaggccttggggtttgggggcctctccagctgcccagctcttgcagctgatggctccacatcttgggggaaggctctgatttcatgatgggctgggggcttctcaggatttcacagcccaaatggcgggaccgtccaggggctccaagaccaacaggagcatgtggtagccacgtcacaacccaagaccatggggcatcaggtgagtttatggtcccctcagctcttcccagaggccctgcctcccgtggggctgtaggagcaggggggctggagcccctcgtggggctggtgactggctgagtcccagccagggcccgacctgggacgtcgggttctccatgggctgggagttggtttcctttcctgccctggaggagacagaggcacagggatgggggcccagctcccgcagagcagggcaaagggcagtgtgtccaccgggagtgtgggaaggtgacagtgttgtggggagctctggacaccgcccagtgttctgcactaggggaagggtcttcagaggccctggaagagggaggtttttagggcagcccagtggcctgagcacctctgttgcttccatcaggacaagaaagatctatgtgggcagtgttccccgttaggctgcctcatccggatattgattgacggggtaaggaggcatagggagaccctggctcagggaccttccttgccctgcagtgccctgcttccccagcccgggggtctggctcactcccagcccacaggaggctcaggcgggtccccaaaggacacacaagcaaaaccctctgcccaaggggggtcatcccagggccatggctggggctcaggcccagcctcatgggcagactgggccaggacccgacttgagagggctcagggaagcctcaagccctgggcaagcccctctctccaggagccacatccccactcaaatgagtgccccccatgaggagcttcaagaccttgtctgacccagcgtcctggagggctcaggcgaccctcatggggaaggtcactgactctggagactgaagccccagtgtgcgcagctcgagccaccagccccagcctggaaggaccaggttctttcacacctgctgtccccacagatctctctcgggctcaccctgcgcctgtgggacgtgtatctggtagaaggcgaacaggcgctgatgccgataacaagaatcgcctttaaggttcagcagagtaagtctacgtgtgcccagcggggcctggggagccctggggtcagaccccgactggcccgagggcagcttcctcacactgtcctcatgatcctctgttctggcccagagggaggtctggccaggtgggctgggcaggacactgtgacaccgagcccatcccccacatgacccagatgaaagtcgagagtgtggtgagcacttccctgtccggatcgccccccagccacagtctcctgtgtgtatctggacacctggggtggccacaaaaggatccggcaccgcccagtaggagactgaagtggccacggggtatgagctgtgaccattcccaggtaactcccctggcctgatatccaccctgtccctagagcgcctcacgaagacgtccaggtgtggcccgtgggcacgtttttgcaaccggttcgttgatacctgggccagggatgaggacactgtgctcaagcatcttagggcctctatgaagaaactaacaagaaagaagggggacctgccacccccaggtgggctccagtgccatgtcccctcccatgtcaccctctggggtagtcagtagtaggggagtgcccgggacccgcaaccctactacctgggccttcctcttcaccttttcttcctcctcttcctcctggactctaagaaagtacaggaggcccaccggtcctcagggcaggcgctcagtgcgtgtatactggacatgctgtgcacgcaggagggggatgtgggcaagaccctccaacaagccccctcccactttccacggtgtctccctctccccctcgcagggccctccaagttactagacgagcccagacccatttgtgggagaccccgcccctccctgcaagcacccacagcctcagagagcagcagaggcccctcactcctgcacgctcctccaaggttgccaggacaagaagcctggagccagggagacaagggaatccgtgtccctgacccacagagcattcagggagagggcacaggcgggaccccgggcccagagccagagccaagagttcagccagaagtgggaacggtcagtcctggcatggactgggcagcccaggagggcagagggtgacccacgtccgggcccaatcacccactgcggagacgggtccccacgtgaggtgacaaggggctgggtgacatccaaggcccctcccacctgagttctgactgggggccgtatcccaggcccaacagccctgggacgaaggtgtgtggcaggaagcccccagccagtctgaaccctgggggcagtcccaggagccacccgccatgccacgacagcttccccacgccaggcagcacgcacccctccctctgggatcagcagactacaggcgtgtcctcggtgtcaggccacgggggccacacagagaccccgaggactccagagacgcaggcaggtggggcccagcccggaaaggcctgcgtgggctcactggagatgctgaccgcgtctgttttcctttcagccaaacccgagcaagggtcgtcggcatccaggcctgtgccggcttcacgtggcgggaagaccctctgcaagggggacaggcaggcccctccaggcccaccagcccggttcccgcggcccatttggtcagcttccccgccacgggcacctcgttcttccacaccctgtcctggtggggctgtccgggaagacacctaccctgtgggcactcagggtgtgcccagcccggccctggctcagggaggacctcagggttcctggagattcctgcagtggaactccatgccccgcctcccaacggacctggacgtagagggcccttggttccgccattatgatttcagacagagctgctgggtccgtgccatatcccaggaggaccagctggccccctgctggcaggctgaacaccctgcggagcgggtgagatcggctttcgctgcacccagcactgattccgaccagggcacccccttcagagctagggacgaacagcagtgtgctcccacctcagggccttgcctctgcggcctccacttggaaagttctcagttccctccaggcttctagaagcatctgggccagggctcatggctggataatttccctaggcttaacaacccaagcaagcttcgcatcctcgttttatttttggttaaacttatgaaaatgtattaagaaagagtgcagctcgagagagattcagagatggaacacaccagaccccagatcacaaagccaaccatgcccagcccctcccagcacccccagccccacgaccatcgttctgaattctgacgacaccgtgagcctgcctttgtacttcaaactcatggaaggataaccaccttcatgttttgaaataaatgtttcctgttgaaatgattttagattttagacagaaatattgaaaaggcactatagtatcctcctataccttccatccagctgcccctaataatgatgttttgcagtcccatggcacataagaaatttaggccgggtgtggtggctcacacctgtaatcccagcaatttgagaggtcgaggcgggaggttcaggttcacttgagtctagaagtctgagaccagcctgggaaacctaggtggacccggtctctagagaaaagtcaaagaaattagccaggcatggtggcgtgtgcctatagtcccacctagtcaggaggctgaggcaggaggattgctggagcccacgagttccaggaagcagtgagccatgattgcaccactgcactccagcctgggtgacagagtgagactttatctcttaaaaaaatttaagaaatttaatgtgggtacagttctattaactaaataataatgtgaactattatctaaggttatgaaggctagaattatcccatttttgcctaacttctcgtacctgtcccaagatcccaccttggactcaccctctgccttcagctcacgtctcttcagcttcctccacatggtccagcaaacacacacctgggctgaatggtagagctgatcgctcatacacaaaggtagaccggtgggcagggattttcagacttacacagtcaatgagttttccttggtgttctggagagcaccgtttgagaaacactttgacagtgaatctaggcctcaagatccatcagctgctctagcttgaattttgctcaagctcagtgaacacctgctctgccgggtgcacgtgaaaggggcaaggatgagaaagctgtagataaagaagacaggacgcagggggtctgtctaagctctatcccctgccttcagcactgagggatgaaatccaactcttagggaacggtggccacgtgctgggccagccccaggctctcaggatctgacagtgggtgacgcagagccaggccttgcccctggggagctctccagcatacacctccctctcccctcccagcgtgccgcaaagcaggcgtcaacgccattgttaatgcacggaggaggaagctgactgttagacctgggttttccagggttgcacggcttctgggagacggatgtgaccctgaggacagggcacaggccagtgtaatgccaggatggaatgagctgtgatctgtgctgtatagaggcctaggccaaggtgggactgacggatgaccaggtcagccgggtcactgaaaacactcttgggtcctcacctgccggttcccaggagtccggaactgccaggagagtggtggcaggtcccccatcctcagctgggtgggcctggatagaacagcaaggcgagggcacatttccctggccattccctccaggcacagccgtgacctgttcattccaaatttgtggaagtatttccacacacacagaactgcaaatagcagtggacatggtgagaggcgtttgcacatgggataggcaggattttggaggcagagcctccagggcttgccgatgggttagctgcagggcttgagagggaacggagaatccaggatgatgtgttcaaatcggtccattcacctcttccgttccacgcctgtgctgggcactgggagagacagatgcacacaggagccccggccgaggggaggtgtcgggggaagcccagagtgtctgggcagggtaggaaacccagagcgtctactgggagctgaaggcttaggtccacctgggtgccgtccaggttctctgcatgtagaagtataggctgagcttcccggaggaggagcagctgctgttgctggtgaccagcacattcaggaacggagactactctgtcaacagacagggggatgacctgaggtctggatggtctagggggtggtagggcccaggaggacccaggaaagggtctcggggatgcagaacatcctatggagggcatttgggagtcagtgctcaggccactccgggtcacgcaggtcatttgccggcctctgtcataattattgccatatgagagtgccacctttcctgtgacataatttagacattcctgtgaatggcctacctgtttatatttacaacttcatgtttaaaggaaatttgtatcactctcataaatggaaagccagcaaaacataaattcaatgaaaacaaaatgaagtcaatgaactttagctagatactattccctgaccaaggcctgctggaggccgtacaaccggggtttgaattgagatctgccaagcttctgagtttattctgtttcccccacaccaaggatcctcaatactgcattactgacatcaggggccagacaattctttgcgatgggggctgtcctgcacctggcaggatgtttagcagcttctctggcctccacccactggatgccaggggaatgcagaagaggcttgcttattctcccatttaatgctcaggacaatatctgacatcaatgttacgtcttttattttataaatgaagacaatgagactcagaaaggtttaagtgagtcacctaagaacacacagacagcaagaggtagaacccgaaactgaacacaggtgtccacaagacaacaaaaaagttcaggttccagcttcctttgagtctctcatttcaacaatggccatcatctgcatacgagctgaagtacaggaaagctgggctgaactctcttcccatcaggcctaggagccccagaccagaaccccagcccaagttctcccagtcaggcccgctggagggagctggcatctacactagcatggtttctcaaagctacagggatgccagtctcgctgctgatgaagaaaatgaagggcatttgcttctcctgcaggctgtcgggatttaacacagattccttttcttgctctcttctcccatagcacaaaactgggtggtccatccccctcccagtgtcccaaggctttgttgcgtgttctctttaatttctcccactctcgcagtgcaccctaccctcgtctccctggcaacctttctgctctatcctctcgccacctggatcacaagaacacttgtgagaccccttaacaagctacatcccaaattatcattcccctttgtcctcagccagtgcccgggtccaactcgctctcctggggtgactttctttcctgcccaatatggtttcatcatctgtaaattggggataattgaagtcttgatcctgatattgggctctgaaagcagaagtagcaagctcagccaagtcacttcaacaagaggagacgttccttgtgaaccaaaagggcactggtcacaagggccgctccttctctcaggcctctccagcacgcccttggctcagccaaagaagagactcaggctgtgcttctgtgctgtggggataacgtaggtacctggtccttgaccctgggactttaacagttccctcttgtggctcagttctacagcttcaatgacacaaagtggcttttgctcaaaatagcctttgataggttaaggtactcctctgccactctaagtctgtgtggaacagacagggttttgcttcacagagaagatgcataaaatttggtcttaaaaatgagttcaccatgcacacatacacacgaaaaaagtaaatactgcattactgtatatatgaggttccaaaataggcaaaactaatttatggtgacagaatagtggtgacctctgagggtcagtgttgactgggagagaacagaagagagcctactggggtgctggaaatgttctgtatcttaattttgcaggataattccttggatgcatccctaaaaattcagtcaagctatatagtaagatttgtgcagtttatgtaagtaataggagagataagagggggaacctgtggagaagcagaacatttcaagatctagaaagcaacagttgcaagggtacacagtgttcagacagggaccaaatcatagaaactactagggcttgccatgctgaaatgactgacttcaaaccatagggcatacgtaccttccactgaagaagagcacctgagtaaaatgactagaggtgcatttcaaagattattctatgggaaatataaagaacgaattggaggagtaggaggcaaatagtccaagggacagatacagatctttctttttcttttttttttttttttgagatagggtctccctctgtcaccctagctggagtgcatttctgcgatcatggctcactgcagcctctacttcctgcgctcatgcaatccttccatctcagcctcccaagtatctgggactccagatgtgcggaccacacctggctaatttttttattttgttgtagtaatgggaatctcactgttgtttcccaggctggtcttgaactcctgaactcaggcaatcttctggccttaacctctcaaagtgctgggattacaggtatgggctacagtgcctggccttattaaaatgttgatgtaataaatgggactacctagtgctgtgctttctccttaaaggagagagctgacagaataaaactagcagtaataatctggtaaattgtgctttctacagagtaaattttgtttgtctcatgacatttatgcaaatattcaaatgtttcaggaatataaacatttaaaatttgggttataaataatgcctcctggctctgaaattatctgaattcatgaagcaatcagtagtaaatatgaaggaaaaatgaaacacagccttatatgcaaggacaaacacaaatttctaattcttgttataatttgggtgcccacctggttttgaaggtgagccttggtctgactggttctgagacatttctctcaaatagcaaatgagtagtgggtatgaatagggtacattggaaagtcatgtcaaaattccatgtaatttttggagcgttttttctcccatatgatttatataatttgacatgtgtattcctatgtaaaatatttaaccacttctctacaataagcattaagtgggctaattagtatgctcttcttattccatatttctgtgatttctcttatctggaacgacttttttatgccacccaggctggagtgcagtggcacatttactgctcactgcagcctcaactccccagggtcaagccatcctcctatttcagcttccctagcagctaggactacaggtgtgcaccactatgccctgctaatttttgtgtttttttgtagagacggggttttgctatgttgccccggctggtcttgaactcctgagctcaagagatccacccaccgcaacctcccaaagtgttgggattacaggcgtgagccactgcactcagcttcttttctaatttgtttttattctgagatcagatgagatcagcatgttcaggttggtatggccatagactgcttttatctattctaataattttgtattgtacaatgtgttggaaaggcaagatgaagttagattatgaagggttcatttccattcaattctgtctatccttctggactttgcctaaatcttaccttctttggagctttcctgaactaacttatctcctttgaattcttacatttggatcctttgtatttgagtatttttacatatatatgtacataaataacacgttttatgtgtagtaatttactctcccaactagattgaaagctgcttgaagagtaacctttttttaaagtcacattggaccgttttaagtacaaatttagcatatgcttgatgattgagagaagaaccatatggttacagtcattggtgtgtctatgattgtgatatgttgctatttaacaatcaatagttatttcttatttagttttctgttaagccataaccttttgctctcatttatacgtcttctgaacgttaagtaacatgtggctcatatttcaaactcccaatttggaagtttatagcaatgtaactgaagtttataattacaggtctcagaaaactgcactacacagaagttctctatgtgttagaagaatttattagaagatagacaattgtaggttacactgtaatttagaagacttttgcgcatctcatgtatttgtgtcagtttgagaatttgaaaatgcccccaaaatgtctgttcttcactagtgcctcttgtgatcctggcagagataagctaaacttttgaaagggtagactttttctgtttatcttagtatcctgagtccctaaatctggaatgtagtagatgtttgtgcatttccctatgtcagcgaagtcaaaatactagaggtggatttttcagcttttcaaagttttcacatttactaagtccttcacagttatcgcctactagttaaaaaactatttgcctcaatttaggccagtgctactttgacatttgcattgctgtaaaacccttactaaaaggtatatttttctggtatataaatacatgtatgcagcttttctcatatctttgagaaagcaaaaaattgtactaaattatgatttccactgtaataggattatggcttagtcatgatcagtattatgttttcagctatgtcttactaggattattgtaaaagactttcaaaatagttcatgtgaatctttgtctgatcttcacaaactcgggtatgtacatagctctcccccaccttctcctggctttggcaatttattttatttttatggtggttatatatatatatatataaaacataccatttaccatttgaactattttaaaaagtgtacaattagtggcatgaagtacattcacaatattgtataaccatcaccactgtccatttccagaacttgttcatcatcccaaacagaaattctctatcccttttcttccccagcccctggtaacctctattctactttctctttttatgaatttgcctattctagacacttcatggaaatagaatcaaacaatatttgacctttcttatttcacttaggataatgttttcaaggtttatccatgttgtagtacatagcagaatttaatttctttttttgactgaataatttgtatatactacatcttgtttatacatccatctgttgatgggacatatttgggttgtttccaccttttggctattgtgaataatgttgctgtgaacactggtgtgcaaatatctatctgagtcctgctttcacttcttttggatataaacctaggaatggaattgctgggtcatatggtaattctatatttaaccttttaaggaacagctaacctggtttccacggcttctgtaccattttatatttctaccagcaatgcacaagtgctccttccattttctccatatctacccaatacttgttattttctgttttctttcaattaataaccatcctaatgggtgtgacatagtattgtcattttgatttttagcttcctaatggctagtgctaatgagcatttttttatgtgctattggtcatttgtatgtcttctttggagaaatgtctgttcaatcctttgcccatttttgaattgagatgtgcgcttttttgttgttgagttgtagttctgtagttctttatacattctggatattattctcacatcagatatatgatttacaaatattttctcccaaatacttctgtgggttacagatatattaatatctgtagattgtctttcatggtcttgataggatcttttaatgcccaaaagtttttaattttgatgaaataatgtatgtagttttgaacttaaacaatgttacagattgcgcaaaggatataaccatgaaattctgatggagtgaccccacagctgcagaaaaccagaaagaaccctactctaaaacccaaaagacttccctagatagagtccttcgaaaataattttctaaattattcacacagcctgtggataaattaagaggaaatgatatctgtaacagtgctgcttgtgatgaaaacacagaagagtcaattatattatcaaatcttagctggaatggaaaatcaggaggatatttattagcaaacattaataaaaggttggcctttattattgtaagcatgtacacagacgacagcatgtagtctctaccataagaatgagaaatgcctcctatctttatgcattctgaaatttaacctttcttaacccaattgctgtaagggcctagggtttatttgttatgtgtgttattggagtagagactgtttgaaggttaagggggtatttagtgatgcaagtgacatttatatgttttaaaatcttctgcttttctaggcactttttaaaatgaaatgctatatttttaaacttttaaaaattatttttattattttttgcagagatgaggtcttgctgtgttgcccaagctgttctcaaactcttggcctcaagagatcctcctgccttggcctcccaaagtgctgggattacaggcgtgaaccacgtgcctggcccaaactttttaaagactttatttctggaggcaggttctcaaaagatatcctatcttaatgggcatatatagagagagagtagtaggtgagtttaagggggatgtaaatattggccgaaagaggtttcttttaggtatataacccctcaaatgtagccctttggatatcaaaagtttattatggcaatgttctttgtgcatttttattcgatgttgtcagccattcatctaataactcttcagaagattttgtctctgggcagtggcattttataacttcctatatggaagaaaacttttatccaactgataactgatatgccaatgtgttagtatgaaaaaattttcccaacattcttaccaggtgtggtggctcaacctgtaatcccagcactttgggaggtggagtcgggcggatcacttgaagtcaggagttcgagaccagcctggccaacatggtgaaaccctgtctactaaaaatacaaaaattagctgggcgtgatggcaggcacctgtaatcccagctacctgggaggctaaggcaggagaattgcttgaatctgggaggtggaggttgcaatgagccaagatttcctcactgcactctagcctgagcgacagagtgagactctgtctcaaaaaaaaaagaaaaggaaaaaaaaagaaaatttcccaaaattcaaatgtcgtttcactgcgtggctttgtttgattattaatactttaatactgtgtttaaaattaatatttattatttttaaaaatcagcttccttaggtcgaagaaacattaatgtttaatattaagctattattgtagcttagtgtagttataataagatactggaactcatggaaggggttagattttcttcatcttagaaaccgttacttttcataaaatatatattgtgcaattatatataaaattatataataattagatatacaaataaaaaatcggattatagttgggctcagtggctcgcatttgtaatctcagctccttgggaagcttagactggaggatttcttgagtccagaaatttgaggctgcagtgagccatgattgtgccactgcattccagcctgggcgacaggaatgagaccccgtctctaaaaataaaaactaaaaaaaaatagattatgattggcaaaagattgagtgacagtgaaaatgcaatgaatattttgactactattttttgattacatacataggaagatacgaatttttctgtctttccaaattagtttagaaattaaagatttggccgggcatagtggctcacccctgtaatctgagcactttgggaggctgagataggcagatcacctgaggtcaagagtttgagaccaccctggccaacatggtgaaacctcgtctctactaaaaatacaataaaaattagctgggcatggtggcatgcacctgtagtcccagctacttggggagactgaggcaggagaatcacttgaacccaggaggcggaggttgcagtgagccaagatcgtgccactgcactccagcctgggcgacagagcgagactctgtctcaaaaacaaacaaacaacaacaaaacaccagaaaaaggaaaaatagtgttaagagataacttagtatgtattgtttgtacacttcatgggtgtgcatatatgacgtgtttggttttatagtgaaaattctaacattctgctgtatggtttatggtgccttgtagacgttcctttaagcactcaatgataaagattaaaattactaagatagagagtaaatctatgttatatgtagtcatttctcagtttgcatagtagtatgggactgtaaaaatgaccatgcaagctaagactattcaaagggatcatagtaatcagtggaaaaaattgtgattgttctgttggacctttaaaaatttttgtcaaaacattaaaaactctctcacagttggttatagatatacagggtaagaagaagcgtggtatccacagagaaggagggagcttcataaacaaagacaaacaggaatatcaactaccagccaccaacagcactcttgtaaaacttatttaaatattacaaaaaacaatatacaagattactaagagattggaagataaagggagaaaatttcactaatgatctcatcaccaaacacagttaattatttgctgttactcttttatcaaattagtgtttagtattgttttaatcataatgtacatacaattttgtatcttgctttttctgagatgtctgtttctgtccatgttatacatacctatacagtcctgtgctgcatgatgatgttttggttaacgatggactgcatacacaactgtgatcccataagataatagtagagctgaaaaattcctattgcctagtgacattgtagccatttacttgtttttgctttctgctttttttatgtagtcatttactatactaaacctttaatcattattttagagtatactcctatttatttagaaaggtcccccaagggaggacagaaaacactcataatttaatgttattgtccttttcacacatatgtagctatatctattatattttattttactttattttattttaatttttgagacagagtttcactctgtcacccaggctggagtgcaatggtgcagtctcagctcactgtgacctccacctcccaggttcaagcaattcttctgcctcagcctcccgagtggctgggattacagatgtgcaccaccatgcctagctaatttttgtatttttagtacagacgaggtttcaccatgttggccaggctggtcttgaactcctgacctcaggtgatccacctgccccagcctcccaaagtgccgggattacagcacttttacagcatgagctgccatgcccagcctattttattttattttgttttattttattagagacagtcttgctctgtccccaagcctggagtgcagtggcgtgatcgtagctcacttggctaatttttaaactttttgtagatatggggtctgggtatgttgcccagcctgatcttgaactcctaggcttaagtgatcctcctgccctgacctcccaaagtgctgggattacaggcgtgagccatcctgcccagcctgtatctattatataagctggtttttttgattactttaatgtaaatgagattataccatactctcttctctgtcacttcctattttcatgtaatttatgttagacatctgtcaatgtcagtataaataggtctagatcattttttatagttgtatacctttcgttacatggatgtttcacaatttacttagctaactacctattgttggacatttggttatttccaaatttttgctgttttatataatgctgcgcttatataaaatatagttctatataattatgtttaattatgtactaccgctgtatctgacaactgacttgtatcaagaacatacaaaggactgttacaagttgccaggcagagtggctcatgtctgcaatcccagggctttgggaggccaaggtgggcggatctcttgagcccaggagttggagaccagcctgggcaacatggggagagcccgtctcgacaaaaatacaaaaattagccaggcataggggcacacatctgtagttccagctacttagaggctgaggtgggaagactgcttgagcccaggaagttgaggctgcagtgagccaagatgacaccacggcactccagccagcgcgtcaaaggccctgtctcaaaaaaaaggaagaagcaggggcggcaaataagtagagtataagccacctcatccaactttattggaaccagtagttgactggttaatcagtccaagcaaggaagcataaaaactgatgcatgtgccgggcatggtggctcacgcccgcaatccccgcactttgtgagaccgaggcgggccgatcacctgaggttaggagttcgagaccagcctggccaacatggtgaaaccctgtctctactaaaaatacaaaagttagccatgcatggtagtacacgtctgtaatcccagctactcaggaggctgaggcaaaaaaaggagaagaaatgctatgtgaagcctttttataagcacattaatttcattcacgagggcagagcactcatgacctaatcaccaccttgaaagcctcacttcttaacatcatcacattaggtcttaggttataacatgaattttggaggactccagaaaaaaaaagtgaaagacaacccacagaatgggagaaaatacttgcaaattatgtacaaagtaggctcactttatttgtggaaaatatgtagccagacacagtggctcatgcctgtaatcccagaactttggaaagctgaggtgggaggatcacttgagcccaggagctcaagactaacctgggcaacatagggataccctatctctacaataaataaataaaattacccagatgtggtgacatgtgcctgtggtcccagctacttgggaggttgaggtgggagaatcacgtgaccccaggaggttgaggctgcagtgagccaagataacattaatgtatcccagcctgggcgatagaccgagaccttatctcaaaaaaaaaaaaatatatatatatatatatgtatatatttatctatctacctatatattcatatatagatatagattaatatagatatataaacatatatttatagatacatagatacataaatatatagctatatataaatatatatttataaatatatagatatatatgtaacaaaatatgttccaagacctccagtgtatacctgaaactgcagatagtaccaaactctatatgtactatgtttttttcctatacatacatacatacctatgatgaagtttaatttataaattaggcactgtaatagaataacaacaataactaataataaaagagaacaattagaatatactttttgtttttgagatggagtcttgctctgtcacccaggctggagtgccatggcgccatctcggctcactgcaacttccacctcccaggttcaagcgattctcctgcctcagcctcccgagtagctgggcctacaggcacctgccaccacgcccggctaatttttgtatctttagtagaggcagggtttcaccatattggccaggctggtctccaattcctgaccttgtgatccacccacctcggcctcccaaagtgctgggattacaggtgtgagccactgtgcctggctagaatatactttaacataagttacatgaatagttttctctgtctcaaaatactgtaatatttgggattgcagctgcccgcaggtaactgaaactgcagagagcatacgggagactacagtatctgacaatggacttggatctagaatacataaagaactcttacaacttgataataaaaaggatataacccaattttaaaatggacaaaagatctgaacagatatttctccaaagaagacatacaaatggccaataagggccaggtggtggcttatgcctataatcccaacactttgggaggccaaggcaggtggatcacttgaggccagaagttcaagaccagtctggccaacatggcgaaaacccatctctactaaaaatataaaaatcagccaggcgttgtggcgcatgcctgtagtcccaggtactcaggcagatgaggcacaagaatcactcgaacccgggaggcagaggttgcaatgagctaagattgcaccactgcactccagcctgggcaacagagcaaaaccccacctaaaaataaataagtaaataaaaataaaagaaagaaaataaatggccaataagcacaagaaaatacactcaatttctgtcttagtctgtttgtgctgctgtaacaaaatacctgagactaagtaatttataagtaaaaaaatttattcctcacagttccggaggctgggaaatccaaaatcaaggtgatagcacatttggcatttggtgagggcctgttccattgttcccgttctcgcagtggcatcttcacatggcaggagaagaaaggaaaaaagaagaagaaatgttatgtgaagcctttttataagggcattaatttcattcacgagggcagagccctcatgacctaatcaccaccttgaaggcctcacttcttaacatcgtcacattaggtcttaggttataacatgaattttggaggactccaacattcaaaccatagaaacatcattagccatcagggaagtgcaaatccaaaccatgttaagataccacttcacactcacaagaatggctataataaacagacacataataacaagtgttggagaaaatgtggaaaaattgaaacactcatatgttgctggagggaatgtaaaatgctttgcaatgaagttggaactgctttggaaatagtctggcagttcctccaaagcttaaacatagagttatcatatgacctggcaatgccaggcttcatcatattcccaagggaaaggaaaacatatgtccacacaaaaacttacacatgaatgttcatagcagcattattcataatagtcaaaaagtggagacagctgggtgtggtggctcccaacactttgggaggccaaggcgggaggattgcttgaggtcaggagttcgagaccagcctggccaacagagtgaaatccgatctctactgaaaatacaaaaatcagcgggacatggtatacgtgcctgtaatcccagctacttgggaggctgaggcaggtgaatggcttgaatccaggaggcggaggccgcagtgagccaagatcacaccaccgtactccagcctgagtgacagactgagactccatctcaaaaaaaaaaaaaaaaaagtgataaacagataaatgaaatgtgttatattcctacaacagaatattattgagccataaaaaaaaaggaaataagtactgacacatgctataacatgaatgaaccttgaaaacattaggttacttgaaaaaagccagtcacaaaagatcacaaattgtatggttccatttatatgaaatgtccaaataggcaaatcctatcctaaaagaaagtaaattagtggttgcctaggactgagggatggaggaaatggggagtgactgctcataggtatggtatttttttttgagagaaatgaaaatattctaaaattgattgtggtggccaggcacaggggctcacgcctgtaatcccagcactttgagaggccgaggcgggcggatcacctgaggtcgggagttcgagactagcctgaccaacatggagaaaccccgtctctactaaaaatacaaaattagccgggcatggtggtgcatacctgtaatcccagctactcgggaggctgaggcaggagaatcgcttgaaccagggaggtggaggttgcagtgagctgagatcgtgccactgcactccagtctggcgagagagtgaggctccatctcataaaaaaaaaaaaagaaagaaagaaaaaagaaaaaaaagaatgtttcaggcaaagggaagagaagtgcaatggtgctatttcaggcagaagcttgtcaggtttgctgtggtgtggtagtgtggaaggactcagtgggaaggaaaagaaatgagggcacagtagtgggcagggccaagataaagccatacgcatactgctacattttttccttgtccaatatatttcattaaatgtagacaaaacttattataaagacataacttttgatgtttgtaaggtcatctgttatttgcactccttttttttttgagatagggtctcactctgtcacccaggctggagtgcagtgttgccaccacagctcacagcagcctcgacctcctgagctcaagtactcctcccaccttagcctcctgagtatctgggactacaggcacatgccaccgtgccccactaattttttattttttgtaaagacagggtttctccatgttacccaggctggtctcaaactcttgagctcaaacaatctacccaccttggtctcccaaagagctaagattacaggcgtgagccactgtgcctggcttgttatttgcatttgtgattttaaaattccatgttttttatcataagattgtcaggtgctttctggacaggaaatgccttaatttatgactcaaaatacaaacaagtgtaggtgatcaaatgcatatctatgtcttcaatggaaatatatatacatacaagtcattaacgaagacaaatgagaacatgaaattcatgacctattttcctttccatcacctagccccctaaaggagagatctttttcattcagagccctgggttttgttttgtttcatgatttgcttttttttttttaaaaataagagtttatttatttatttatttgagacaaggtttcactcccatcagccaggctggagtgcaatggcgtgatctcagttcactgcaacttctgcctcctggactcaagtgactctcttgcctcagcctcctgagtagctgggactacaggcacgtgccgctgcatccagctaattttttgtagagacagggtttcaccgtgttggccaggctggtcttgaactcctgagttcaagcgatccgtctgcctctgagtctcaaagtgctagggttacaggaatgagccgccgcgtggccaaaagagtttattttttaaagaaaattgacttctttgaaaacgtagaaatgaggccgggcgcagtggctcacacctgtaattccagcactttgtgaggccgaggcaggtagatcgcttgaactgaagagtttgagaccaatctggccaacatggtgaaaccccatctctactaaaaatacaaacattagccgggtgtggtggcaggtgcctgtaatcccagctactcgggaggctgaggcaggagaatcgcttgaacccgggaggcggaggttgcagtgagccaagattgcgccattgcactccagcctgggcaacaagagcaaaactccatctcaaaaagaaaagaaaaagtagaaatgaggaagcggccagcctgtgtggggatctaatcaaacaaatcttcccctgatgagggtagcacttaagttgaaaaaaatttgcctatataataaatattgcaatactttatttatttatttatttatttatttttcgagatgagggtctcgctgtgttgcccaggctagtcttgaactcttgggctcaagggcttctcctgcctcagcctccccagtggctgggctaataggcacacaccaccatgcccagctctacatactgattttttttttttgagatggagtcttcgctctgtcgcccaggctggagtgcagtggcgcgatctccgctcactgcaagctccgcctcccgcgttcacgccattctcctgcctcagcctcccgagtagctgggactacaggcgcctgccactgcgcccactaattttttgtatttttagtagagacggggtttcaccgtgttaaccaggatggtctcgctctgctgacctcgtgatccgcccgcctcgacctcccaaggtgctgggattacaggcgtgagccaccgcgcccggcccatactgattttgaaatttaaaaaatctacattctatattcgcatcatagcttctccctaataaaatctttgtgagtgtttatgggacttattccccgaaaaatctgcaagcagcctggtagctttatatacacaggaaagccaaaggacaaactaggaattacgtcagagatggggaaagactaaggatcttacccaaatcagttgagaatcagccttaagtataaatgggccaggtgttggtggctcacacctgtaatcctagcactttgggaggccaagacgggcagatcacttgaggtcaggagttcgagaccaccctggccaacatggtgaaaccccgtctctactaaaagtaccaaaattagccaggcgtggtggcacgtgcctgtggtcccagctacttgggaggctgaggcaggagaatcgcttgaacctgggaggcagaggttgcagtgagctgagatcacgccactgcactccagcctgggtgacagagtaagactctgtctcaaaaaaaaaaaaaaagtataaatgaagcacaattaacatttgttaattttataaagcaaaagttcataaaaataaatattctaattaactctcctacatcttataaacactattaccaaacccatttaagattgaagataaattatatcatggcatgggtaaagattttcaataaggagttgctaggataaaagtcaaaattctccagcataaattcactgacagggatttctgtttaatcttttcaaaattctaatacccaatttgtttcctctagagaataactcgtgtagaatcataacctctttggtggaccttgatttttccatctgtaaaagtatagaactagttttgacttaacagtcaacaaatgcctaccctctccacatctagctgattagagcgccctcatgtgcgcatttgctgtaatgttttagaaatctgaaaaagacaatattaatctcagcagtaatacaataaataatgtcttcatttgcacatttatagcaaatgctataaatatatagctccaagtattactcagtaaaagctaaaggcaaatgctgtagtaggttaatcttactgtcgttcactatcaaacctttcatatgccaattttatcctaaaacagtgaagttattgttttggtttcaattttaatttaatgacttaaaggattttttcccttaaaacttctaagtatttcattataatattatttcatcattaggcttaaaggaaaatatgtggtcaattgagttgttatttattatacatgatagcttgacatcatctttttagggatggaaaacagctccagggaccaagtctaactcagttttttgatataagaatttacctgtcggccgggcgcaatggctcacacctgtaatcccagcactttgggaggccgaggcgggcggatataggtcagcagatcaagaccaggagttcaagaccagcctggccaagatggtgaaaccccatctgtactaaaactacaaaaattagccaggcgtgatggcaggcacctgtaatcccacctacttgggaggctgaggcaggagaatcacttgaacccggttcaagtgagccggttgcagtgagccaagatcacgccactgcactccagcctgggcaataagagcaagactccatctcaaaaaaaaaaaaaaaaaaaaaagaatttactagtttgaatcataacaatttcttcctactcaaagagactacattggaggaagccaaaacagaagcttatttatttatttatatactttatttatttatttttgagacagagtcttgctctgtcacccaggctggagtacagtggtgtgatcttggctcactgcaacatctgcctcccgggttcaagcgattctcctgcctcagcctccctagtagctgggattacaggtgtgtgccaccacggccagctaatttttgtatttttagtagagacgggttttcaccatgttggccaggctggtctcaaactcctgacctcaggtgatccacctgcctcagcctcccaaagtgctgggattacaggcatgagccaccaagcccagcttagagaagcttattttttaaaagaaaatacacaaaaaaatcaaaatctcataagtccaattgtaatttttttttggcttttaaaaattgttaatgccctcaaatattctcctatccaatcactgtattttaaatggcattcctccagcaaatatttgttgagcccccactatgtgccaggattgaaatgtcaaattgaaggaggcaatagctactgaagtaaagcaaaaaaaagtactggttatttttccttctataaaatgacctagtaataaccgctttacccaggagagttgctgtaaagatctaataacatgacacatataaccacacccctaaagaatgaggtgttactgcatgttctcactcataggtgggaattgaacaatgagaacacatggacacaggaaggggaacatcacactctggggactgttgcggggtgtggggaggggggagggatagcattaggagatatacctaatgctaaatgacgagttaatgggtgcagcacaccagcatggcacatgtatacatatgtaactaacctgcacattgtgcacatgtaccctacaacttaaagtgtaataataataaaataataaaataaaaaaaagaaattttgcttaaataaatattataataaaaaaaacaaatgaggtgttattaaaatgtttgcaagagaaaccctagtaattccaagcacatattttaggaatggtttcttgtgtagaaaatcctggaatgtgaggctctgctgatttttttaatgcatattctcttcttatgtatgcggaatttttttttttttttgagatagagccttgctctgttgcccaggctggaatgcactggcacgatcttggctcactgcaactgccacctcctggtttcaagtgattctcctgcctcagcctcccgagtagatggaattacaggcgtgtgccaccgcacttggctaatatttgtatttttagtagagatggggtttcaccatattggccaggctgttctagaactcctgaccttgtgatccacccacttcagcctcccaaagtgctgggattacaggcatgagccactgcacctggcctatttttgtttttactaatgtttcaagagacccactttatgtacagaattctggctacaacctaacaaatgagttgctctgttcatcagttatagccaatttaagtaattatgaaaagctcaacaatacttttaactggcaatgaaagcgtcaatagctcacatttaccaccacaacttaggatttcttggtagctaaataaaatgcttctattttgtggggggaaactgtcacataagttgaaattctgcaatgttcaattgatgaaaaggtctctatgttaaatcaaaggtataaattccacatcagtagtacatgaaagagaaaaaaaaagccaaaattaaagtgattcatgcccacttccctgagtgaacctaagattttactaacagagatgccgtaactttgatcatgcacacatcaaacttgaatttaaaaacatgcatgcactcactcatcttttatctcttatgtaattaatactgtaagattatattttgcctacgtgctctatattactaatttataggattattactattcagtgttgtttacttgaaaccatactgtactatacacaacttttgcattccatgctaactttatttttttaattattttttttttatacagagtctcactcactctattgcccaggctggagtgcagtggcacgatcttggctcctgcaacctctgcctctcgggttcaagtcattctcctacctcagcctcccaagtagttggtaccacaggtacatgccaccacacccggctaatttttgtatttttggtagagatggggtttcaccatgtgggccaggctggtctcgaactcctgacctcaaggttataggcctgagccaccatgtcccagctccatgctaactttagagcttatttcccatcccataagatacaacactacttgtgttatatagtgagcagtgtggggaagaaaagcatagaattaagttagtgacaaatccagtgaactcaaaaagagggaaaaaaacactcccaaacaattgttttccccatattctattctccctagaggtattccatacaggaacgacaaaagaaaaaaaaggatacaaaatgagaaagatgttcatgtgacatataagtacagtaataaaatcaacaagcatatatggtatttaagcaaaatagtatgtatgcattgatggtcatctgatataaatccatcatttctgttggccaacatctaaaacctttacttttctgaggagacaagctataaatctatacggatatttctacaacgagaattcactattacatatgaaccaatataatttgatgtcaaatattcacaattaggtttaaaaaatcccctacttggccgggcgcagtggctcatgcctgtaatcccagcactttgggaggccaaggcgggtggatcatgaggtcaagaaatcaagaccatcctggccaacatggtgaagccctgtctctactaaaaatacaaaaattaactgggcgtggtggcaggcacctgtagtcccagctactcaggaggctgaggcaggagaatcacttgaacccaggaggcagaggttgcagtgagctgagatcgcgccactgcaccccagcctgacgacagagtgagactcggtctcaaaaaaaaaaaaaaaaaaaatcccctacttatgttaagagtaccaaaaatagggccaggaatgatggctcatgcctataattttggcactttgggaagccgaggtgggaagatagcttgagtccaggagtaaaatagtgagactctgtctctacaaaaaaataaaaaattagctggatggggcacacacctgtagtccaggtactcacgaggctgaaatgggtggatcacttgagcctgggaggtcaaggctgtagtgaactgtgatcacaccactacaccctacacccagcctgggctacaaggtgagaccctgtctcaaaaaaaaaaaaaaaaaaaaaaaggtaccaaaaatctatagctgtttcagaaataaaatacatgtagttagtgaggtttttctctcccactgctatgacttaatttttggttgagatgctaagccaaacatcattttaagtctgtggcccaaccaaaaaagggaatcatactctccaaagaattgtacattcccactctaattgctaaaataaaatgttggattatgaaaatcaattttgtaggtatcaataagttataagagcatggcttatttaaaaaaaaaagtgggccaggttacctacatgagctgcaaagcaagcaaactgaattttcttatcgaagagcccatcctcatacttaaaatttcccatgactacatggaaattctttcacttaccaaaaacacctgattggcactttcactgagagttgtgtcatctgggctgtcgacaggtgtctgacgtgtaaacttggaatcaaactgacttacatcctcttcagattgctctatacaaacaaaataatttagaaaataatgaatagtccatatgacatcaatcaaatgcactgtaagctctgggagctcttttcgcaggggttaactataataaagtattagaatagtcttagcaggcactattctaatagtggagaaatgcaagtggaagaaaaaaatgcaagtggaaagtactgagtcaaattacatcttcaaatcttaaacatgcactaaaaaagattttagtatactgttattcctattaaaaatgtgaatatattggctgggcatggtggctcaggcctgtaatcccagcactttgggaggctgaggcaggcagatcatgaggtcaggagttcaagaccagcctggccaataaagcgaaaccccgtctctactaaaaatacaaaacatcagccgggcgtggtggcgggcgcctgtaatcctagctactcgggaggctgaggcaggagaattgcttgaacctgggaggcagaggttgccgcaagcagagatcgtgccactgcacaccagcccaggtgacggtgcgagagtctgtctcaatgaaaaaaaaaaaaaaaaaagaatatatcgagctcaaaacaagctggaaaaaatgtgaatatcaatttcccctctcacaaagcttcagtgtgcctagtccactggctaaatccctgtttagagataattaattcagttggctactgcacgtttgtaataaacctgaaaaactactgaagcagagttaaaacatgaataatactggtaagatgctccagttaaagtttcttcccacagctcatttcattccttcagaaatctaaaggagcaaaaataattttctattccgcatgggttataagttatatttccttgtgaaagtatagttatcacttcagttctaaccatgagatttatttatttaattccttctctctttcccaaaatatctggttaaactcttgggccaaatgtaagaagtaaataataatttagaatatctgacttaatactaaaagatgatgaccacattgaccttataattctcttagagcccagactgtgaacctgcactccctggaggaatggctgattccaagtgtggggaaaatgtacaagataagcatagaacaccagtttccttattttgctctctcgtacaacaccagacaatgtgctcatgtcaaaaggactcagaacccaacatgaagatgcacccagcattcactgcacccagcattcaacgaagggaaaaaacgagcaccaataaaaataactgctaggtgcggtggctcacgcctatcatcccaacactttgggaggcagaggcaggtggattgcttttgagctcaggatttgaagaccagcctggtgaacacggcaaaaccccgtctctaccagaaacacaaaaattagctgggcatgatggtgtacctgtggtcccagctactcaagagggtgaggtgggaggattgctggaggtcgggacgtcaagcctgcagtgggcagcgatcataccactgcactacagcttgggtgacagagttaagaccctgcctcaaaacaataaatgaataaataaaaataaaataaaaataactgcgatgaaaggaaacacaaatatgttaaaacgtgtaagttcataatatactaaaaaagaaaaaaacacacacaaagttcattggtcaattttggaagatgctagggaactaattcattattttgaaaactaggaaagaatcaaacatacatcctgccttttctgtatgaactgtaccttgggtaactaactgatcaaagagtttctctttatgaaagaattccagctaacaaagaaagaagaaataacagttagaataaaaccatttcacaaacacctgatgaaactacaaaagtaggccagagtttctcaacctcagggctactgacattttaggcctattaatactttgcgttagggggctgtgctgtgctgtgctgactcttacccctgaaggtacctatagcattccctctcccaagctgtgacaatcagtgtgtctccagacattgccaaattaccctggtagtgaaatgctgacacaggcagtgaccactaacatcactaaaaaaacacacatacgcacacacaagtacacattatgcctcctgatcaaagcatatgcgatactgagagtgtaatctgaatcagatcaaccacctaaatttaactaccagtttttggaaatttggggaacagatgaacatggtcaatgacactctggggataatatcagcaaaatcaaaatttgagaattctacaggacaaatgaccccgtttcttcagtaaatcacgaggggaatctataaaagaaaagagacctaagagacatagtaaccaaactacatacagaccttgattaaatccttacaaacaggagaaaaaaaaaaaaagaatggaacaacaacaaaaaaaaaattaggtggggcaacacagggagacctcatctctagaaaaattcaaaaaattggatgtggtgatgcacccctgtggtcccagctatatgggaggatcccttgagcctgggaagatgaggctgccatgagccactatcatgccactgcactccagcctgggcaacagagaaagaccctatctcaaaaaaaaaaaagagaaaaaaaaaactggggaaactgtcaacttcttaggtgtgatgatgggatgacagttatgtttaaagaagatgatctaattatttttaagctgggcagtaggtgtatgacagttctcctccttacaattgtttgttgttttttaaagtgggtcacattatggggcatgaccaaaaaataatcaccatcatcatcctcctccttctccacctacagcccaaggaatggaaaaagaaactgttttctcagattctgaggtggcagaaagacaataacacactaactcatttactcataaacatattgttatggattgaatcgtgtcccttacccaccccccagaaaatttcgtatgttgaaactctaacctctagttcctcagaatgtgaccttatttggaaagggttattgcagatgtaattagtgaagatgaggtcctactggagtagagaggaaccctaatccaatatgcctggtatccttataaaaaggggaaatttgtccacagatatgcacacaggtagaacaccatgtgaacatgaaggcagagatccaggtgatgcacctacaagccaaagtatgccaaagatgagcagcaaaccaccagaagccaggggagaggcatggaacataaggtttctcacagttgtcgaagaaaccaactctaacaacgtgatctagaacttctagtctccagatctatgagataataaatttctgttgtctaagccacccagtttgtggtactttgttgcagcaagcctagcaaactaatgcacacatattctatattttgaagaaaaaattcccagagaatcatatttaaaatggttaaattaagcaaaataaaacaaaccaaaaaaagaaaagtcccaactacctgaaatatttaattgtcttaggaaactgacttaaaaatatctaatacaggccgggcgcggtggctcacgcctgtaatcccagcactttgggaggccgaggtgggtggatcacaaggtcaggagttcaagaccagcccggccaagatgatgaaatcctgtgtctactaaaaatacaaaaatttgctgggcatggtggcaggtgtctgtaatcccagctactcaggaggcagaggcagagatttgcttgaacccaggaggtggaggctgcggtgatccgagatcacaccactgcactccagcctgggggacagatcaagactccgtctcaaaaataaaaaaataaaaataaagaggaagaacgctatggaatttgactagaattagggctaacaatatgaagcactttgggaagccaaggcaggtggatcaccatgtcggccaggagtttgagaccagcctggccaacatggtgaaacctcatctttactaaaaatacaagaattagccaggtatggtggtgagcacctgtactcccagttactccagaggctgaggcacgagaatcactggaacccgggaagcagaggttgcagtgagctgaggcagcctggtgtccaagctgtggtgagccatgatcataccactgcactcaagtctgggcaacagaggaagtccctgtctcaaaaaaaaaaaaaaaaaaagggccaggtgcagtggctcacacctgcaatcccagcattttaggaggctgaggcgggcagatcatgaggtcaggagttgaagaccagcctggccaacatagtgaaaccccatccctactaaaaatacaaaaatcagccgagtgtggtggcatgtacctgtaatcccagctactcaggaggttgaggcagaagaattgctcgaacctgggaggcggaggttgcagtgagccaagaccacatcattgcactccagcctgggcaacagagtgaacctccatctcaaaaaaaaaaaaaaaaaaaatttaaaaagggagtatagggccagccacggtggctcacgcctgtaatcccagcactttgggaggctgaggtggctggatcacggggtcaagagatcaagaccatcctggccaacatggtgagaccccatctctactaaaaatacaaaaaattagctggacacagtggcaaatgactgtagtcccagctactctggaggctgagacaggaggatcgcctgaacctgggaggcagaagttgcagtgagctgagaccataccactgcactccggcctggtgacaaagcgagacttcgtctcaaaaaaaaaaaaaaaaaaaaaaaaagagtttaaaaaaatctttacagaagaatgacaatatagaaaaaatacagaaaaaatagaaaagtctccaatttctaatcactatagtaatatttgatttgggcaagaagcaatccagatgaaaccattaagtaaagattattatgggacagaatattcacactgtttctatcatgccatagatcacttgttaattacaaaaggaaaaagaggctgagaatggagtctcacgtctgtaatcccaacactttgggaggccaaggagggcggatcaccttaggtaaggagtttgagaccagactggccaacatggcaaaaccccatctctactataattacaaaacttaggcaggcatggtagcaggcacctgtaatcccagctacttggggggctgaggcaggagaatcgcttgaacccaggaggtggaggttgcagtcagccaagattgcaccactgcaccccagcctgggtgacagagtgagactccttctcaaaaaaaaaaaaaaatgcccttattcttaggagatgtatagaagaaattaggggtgaagtgctatgaaatctgcagttaactctcaaattgtacagaaagaaaatttattaatgttaaaaaaagtcaatattcatagatacacatatatgtgggggcaggtagaaagggagggacacagagacaaagaaaatatggcaaaatggtaacacctggtgatcactgaactattcttgcaactctgaaaagtttaaaaaatttcaaaggtatattgtttttgaactgctcgggaggtttaaatttttgaatttttaaaataagcaatcaattgtgaggaagtctgagaagccacagacttaagagataagatgaaaaataaggaaagtagaatcacagtaataagaggaacagagtttcaaaatgctgtggtcagtcagtagcttcaatgcaaaagaaagttaaattaaggaccaactcagtaaagacaactggattcagcaactgggaagtcagtgatgacctagggtacaggagctgcactgaaatagtagagttgggccacgcgtggcccacatctataatccagcagtttgggaggccgaggtaggtggacctcttgaggccaggaattcaagaccagcctagccaacatggtgaaaccccatctctactaaaaatacaaaaattaacccgagacagtggcgcacccctgtaatcccagctactcaggggcctgaggcatgagaactgcttgaacctggaaggcagaggctgcagtgagctgagatagggccactgcacttcagcctgagtgacaggggaagactctgtctaaaaaaacaaaaaataggcctggcgtggtggctcatgcctgtaatcccagcactttgggaggccgaggcaggcggatcacgaggtcaggagatcgagaccatcctggctaacacggtgaaaccctgtctctactaaaaatacaaaaaattagctgggcgtggtggcaggcgcctgtggtcccagctcctccggaggctgaggcaggagaatgacatgaacccgggaggtggaggttgcagtgagctgagattacgccactgcactccagcctgcgtgacaaagccagactccctctcaaaaaaaaaaaaaaaaaaaaaaaagacgtaaactgggtatgtgcctttagaggtggtgcacatttttagcattataaatgaatataaatgagtggcaactgttactttggtccacagatttttggtatcttaactagtttttggtctcttccactaaaggcattgcctgttgaaccttgttaggaatgtaagtactgaaggcaaactgcctgggtttgaattttgttctgtcccttgcaccctgcctggtttcaaatcctagctctgcttattacgttcttttaaggggatgacctttgagcaaatgtcttagcttctgttttccccagtaaatggacacaatagttgctactttgtgaaagattcatgtaattgaccagcatttaccaagtagcatcagtgtttagtttcagtcattggtgattctgcagttggactgtgagggggtattggggtggggggtggtgtgtgtgtagcacttaattgcaggcaggaaggaaaagatacttttgataaccgacaggcagcttttctctgcttttgtgtcaaaagggaggaagggagtttggagagggaaatgaattctctgtaacactaagctctcttcctcaaaaccagaggtagatagaatgtgtaataatttacagaatttctagacttcaacgatctgatttttttaatttatttttattttttcaggttgagactgagctaaagttaatctgtggcgacgttctggatgtactggacaaacacctcattccagcagctacaactggcaagtccaaggttttctatcatgaaatgtaggttctatactaacaattaacaagtgtacttcaataaatttaaacattctcaggaatagttgactttgtttctttttttcttagacatttcatattattttccttattaaatataaccaaaaatcccacagaaattaactgaggagcctctaaatatcaacaaaattatcacttgatagactagaattaaacaagcaagtggttccaagaaatggcacgagtgtattaatcataaaataaaatttctacatgaaacattcagccattctagaccatttctgtctgtgcagactcatcttttcctgttctttgcaaagcccagctagagcaagcaagttcttcccaataggtttttcccatctctggttgcttggctggctgggcttcctctacaaacccccttcctttcccctaagcagggcccggtgtccccatcccgcggagttgacctcatgagggcatctgaccaggagtagctattcctggtgctattgtcattgtcctgtttcatgtgtgaacatggctggctctacagagatttggcgggtagcaaggaggtttctttttgaatcttcttttggaagtcagacttgatgaggatcttatgcccactttttcctagctctgtggtgtcaggcaaagtctgtttctgcaaatgggggttaagaattcctacctcacagcagtcttttgataaataaataagatcttaagtgtaaattattccactagaaattgcacagtcactttggtcttcatcctggaggtccactgacaagcctcatgcaaacctgtggccctgttcataaagtgttttgatccatactttcaaatggcctcaggaagaccttttataaagtaaaaatgttaggcagccacatgatatccattgacccagtgaggctgttttactggatataagaggtttgacccggcattttggggggccgagacaggcagatcacttgaggccaggagctggagacctgcctggccaacatggagaaaccccatctctattaaaaataccaaaaaaattagctgggcatggtggcacatgcctgtaatcccagctacttgggagactgaggcacaagaatcgcttgaacccgggagtcagaggttgcagtgagccaagccgagatggcgccactgcactccagcctgggcagcagagtgagactctgtctcaggggaaaaaaaagggtgaggggagggtttgaaaaaatagtagcatgtagttatgtttctacaatatttgatatatataaggatttaccaacctcttgcattagctgctatcccctacagcagttgctgtaggaaaaaaacatcaagttctgagctcctactgtttgccaggcatattctgagatgatcacgttgaaatctcagagttaccctgcagagtagtcagggtatcactgcctgacagatgaagaagctgaggcttccagcagttaaatgacttaccccaggccacatagaaaatgagtgggagagcccaggtctgtctgtgaggtataatgaaattagcataaaccctccacattggcgccactcgcataaattaacatatattctctcacagaaagtattttattgggcataacagtttgtatcatttaccgtttaacattagccgtggatcttcccacatcacatgactatgcctcattctttttggataatatgattactattgaatggatttactatcattcacttaatcaatactccttttgatggccattttaattgtctattttttccttttgcacagattggtgtaataaacgtgattttatagtaatatttttgtctgcctgtgaaaatgtttgctggacaataaattcctaggagtcaaataaggtcaaagattataaatacagtatttattttcataaatattaccaagtcagccacaaatgtttaaattactaatggtttcagattattgtatttaatgagtaaacacttttatagggtttacttttatgaacacttttatttgccagatatcattctaagtcctttacaaaattaacttttttaatttgtaatataaccctgagatgtatattaggattatccccattctacagataagaacactgagaagttaattaacttgccacatatctaggaagtgacaaggctagttgcacagccaggcagtctggctcctgagtccacattttagacaacactatacctcctggttcttttgaggcattactgctggaactatcctaatactcataaataaacatttcttttggggagggccaaataaaattttaaacagaaaagttttcaccaactgtcaagctcataaagttgtacgttatacacttttttcatgatgcccacagataatttattaatgatatcatctattttaaaagacgtatgtaaaacccaacccttaagaaaggattcctatcactgttcccacaggcaccctcctcagtcttatacctttccattccaccccccaaaacaaatcattcagcatatttatttcatactgtaatagaggaagtagcttctttttagatattcttagattattaacattgatcatacaaacatggaatagaaattccttatgttttatctggatttaaggtgctacataatggaatctatttctatcaagccatacacattggagataatgaaatcacttgtgttctagcctaaacgttatgggaatttcagaactgcaacataacagataatccttggacgaaaactaaatctctcctctggtcaggcatctatgtgcatcagtgaagagaagacggggactgtggaagggaaaacagtgagtcaggaaggactgtggccacatctgttccccggaccctcaagtagttaaatcctgacctcctctaccccagactgtcctggggaacggccaacactggcttttcacaactgtgtgttaccagaaatgcaacagaaacccagctgaatccccagggtttcccttctgcccttctcaatggaaagatctgtcccaggaccatttattccaacattttcaattatgagaaatctgggaagataaagttattttcacatttctcaagaaatacatacttattcatactcatgacaggaaagtcagaatctacagaaaaccaagaagatttttaaaaatccatgataccaccatcaaaagagccacacttagtatgttggtccacaggtttcctagcacccttttctgttggtgtatgcacaaaatacacaatcacattctgtctacattttacaatttgccattttttgattaacactatatattgaccaatttttaagacctgcaacatatgtcgacaacattatttcagaataatatatttataaataaacgcacacacaaactgtctgtcttatatacaacacgtcttactttctaattctccactctggaagatttaggttttcctaactttttaatatactcaccaggaatcagtaaactttttttataaaaggccaaagggtagatattttaaactctgcaggccataggtttctgttgcaacactcaactctgctgttgcagggaaagaagccatacacaatttgtaaatgaatgggcatgactgtgttctgataaactttacaaaaacaggtggtggactagatgcagcctgctcctctggacatggcttaccagcccctgacatataccactacagaggatgctgttagaatgaaatctctttacacatctctgatcatctccttagggctaattgctagacatgacatcatggtagctgtgggtcaaagggcatgcacgctctgggatgtacattgccagattgctcatgatcagcctttctcatgtcaaaatgttttgtgaccaccagaaggctggttctgcttttattatccattgactgaggagtagaaatgacatggcatgtatgcaggatatttaaccatcgtatagataatccttgtgcacaagtgcattctatattctttcccaataggtctacatctgccagagttgaaataaaataaaacaaaacaaacctatttagcaccttctgtgtagcaggtccattcatgtatgttgttgtatttcattctcagaattcttatgacctaggcattttaaacatttttttaaaaatattgagttgacaaggattgtgtatatttaatgcatacaatgtgatgatttcatatatgtatatattgtgtactaattatcacaatcaaatttattacatccattaccacctatgctgtacattaaatctccagaatttgttcatcttataactgaaagtttacaccctttgattaatagcttcccattttccccacctccagcccttggcaaccaccattctactatctgtttttatgagtttgactctcttagatcccacatataagtgagatcatacaaaacttgtctttcggtgtctggcttatttcacttagcgtaatgtcctccaggtttatccaggacaggagtttcttcttttgaatggctaatagtccattgtttatatgtgttttatttatccattcatctgttgctggacacttaggctgtttccatatcttgggtattgtgaatagtgttgtaataaacatggggcgcagatctctcttcaaggttctaaactgattgctgaatcgtatggtagttctgcttctaattttttgaggaacctccatactgttttctgtaaaggttataccactttacattccaaccaacagtgtacaagggttctctttcctctatgctttcgccaacacttgttatctcttgtcgtttttttataagagccatcctatcctatgaggcaatatctcactgtggttttgatttgcatttctctgatgattagtggtgttgagcaccttttcatatgctggctggccatttgtatatcttccttggggaaaaaagtccattggggtcctttgcctatttttaattgcgttattcatgtatttattaatttttgctattgaattgtgtgaattccttatattttttcaaataaccccttatcaaatatatgggtcgcaaatattttcttccatcccgtaggttgccttttcattttgtcatggtttcctttgctgtgtaaaaccttttaagattgatgtagtcccatttatttattttcacttttgttgcctgtgctttggtgttacatcaaaaaaaatattgccaattatgaccaatgtcgaggagatttttccctatgtttacttccaggatttacatggtttcagatattacatttaaatctttaatccactttgagctaattttcggtatatgatgtaaaacaagtgtgcaatttcattctttttcatgcactttccccaacaccattcattgaagagagtttcctttctacattgtgcctttttttttttttacagtacagtgaaagcaagtctattaagaaagtaaaggaataaaagaatctacattgtatatccttgatggccttgtcaaagatctgttgaccatatatgcacggggttatttctgggtgagcttggcattttttttttttttttttttttttgagacagagtctcgctctgtcgcccaggccggactgcggactgcagtggcgcaatctcggctcactgcaagctccgcttcccgggttcacgccattctcctgcctcagcctcccgagtagctgggaccacaggcgcccgccaccgcgcccggctaattttttgtatttttagtagagacggggtttcaccttgttagccaggatggtctcgatctcctgacctcatgatccacccgcctcggcctcccaaagtgctgggattacaggtgtgagccaccgcgcccggccgagcttggcatttttatctacctcattctaccgatgaggaggccgagtctcagagagttcacagacctgcctaaggtcactcagctagaggtgatacaaccagggtttgaactgagatctgccaagcttctgagtttattctttttcccccacaccaaggatcctcaattctgccttactgacatcaggatccggtcaattctttgtgatgggggctgtcctgcacctggcaggatgtttagcagcttctctggcctccacccactggatgccaggggaatgcagaagaggcttgttcattctcccatttaatcctcaggacaatatctgacataaatgttacgtcttttattttataaatgaagaaaatgagactcagaaaggtttaagtgagttacttaagaacacacagacagcaaaggtagaactggaaaccgaacacaggtgtccacatgggacaacaaaaaagttcacgttccatcttcttttgagtctctcatttcaataattaccattgtgtggatatgagctgaagtacaggaaacctggggctgaactctcctcccatcaggcctaggagccccagaccagaaccccagcccaaggtctcccagtcaggcccgctggcgtgagctggcatctacactagcatggtctcccaaagctgcagggatgccagtctcgccgctgatgaagaaaatgaagggcatttgcttctcatgcaggctgtcgggatttaacacagattccttttcttgctctcttctcccatagcacaaaactgggtggtccatccccctcccagtgtcccaaggctttgttgcgtgttctctttaatttctcccactcttgtggtgcaccctaccctcatctccctggcaacctttctgctgtatcctctcgacacctggatcacaagaacacttgtgagaccccttaacaagttacatcccaaattatcattcccctttgtcctcagccagtgctcaggtccaacttgctctcctggggtgactttctttcctgcccaatatggtttcatcatctgtaaattggggataattaaagtcttgatcctgatatttgactctcaaagcagaagtagcaagctcagccaagtcacttcaacaagaggagacgttccttgtgaaccaaaagggcactggtcacaagggccgctccttcttctgtcaggcctctccagcacgcccttggctcagccaaagaagagactcaggctgtgcttctgcactgttgggataacataggcctcttccatgtggttccacaccaggaacatggggacaatcagacctctcccagtgtgggcataaggatacaagatcatgtcaatattgacattcataatggctgggcgcagtggcacacgcctgtaatgccagcactttgggaggctgaggtgggcagattgcttgaaccccagagttcgaaaccagcctgggcgacttggcaaaaccagtctctactgaaaatacaaaaaattggctgggcttggtggcgcacacctgtagtctcagctacttgggaggctgaggtgggaggattgctcaaacccagggaggttgaggcttcagtgagctatgatgacactgctgtactccaacctgggcaacagagtgaggccctgtctcaaaacaaaaacaaagacaaaacaacattcataacagtagcaatagctactatgtgccaagcccaggcacctcttcgagtctttgctgtcaccctatcaggtaagcgtgcttagaagttacacgaagcacacggctcagtgtttggcccatggtaagggcctaaaaagggatagccccagtggtggggatgctgctgctgctgaccattaaccccagtctgctccaccttcttccaggcagtctgtgagatgtttcatgtccgaggcaaacagcacattcagatccccaagctctacacctccagtgtgaccaggcacctgcaccacttcaggctcatgcaggactcacagcctttggacctcagctaaaggacttgcttctcttcagcacacggggcttgtttgtgttggggtctgagccctgagcccatggtcaaggagacccccaggtctttctgaacagagacagctggcctgggggcctccctctcactgcgtgcaagaggctgttagggtgcaagtctcaaggcgctgagggaggctgtttcaggagggagccccaggagggtggtggagacagaagggggcagcatctgccgaggccctactgtgtgcctggcaccgtgtggggtttctggcccatatgggctaagtgaccctgcacactcctcttaggagagaggctcagatggagaaattgcagttcaggaaggtgaagcaagctgctagcctgtggccatgttgggatctgggcctcagccttccagccacgaaggcagccaagtgtcatgaagaaggcatcacagaggcaattccaggctgtagtggtgaactttccactctgcatccccgggtgctgtgccctgtgccctgtctaaggtagccctgtgggtttctatatgtttaaattgtccccagcatcaatgatgctctcctgtggatcccaagccatggagatgtcctgggacttttcatttttaggtacctaaattgaatttcccaacacacagaagcaagacagccgccctaacagactcttgcatgcagtgagagggaggccgccaggccagctgtctctgttcagaaagacctgggggtctccttgaccatgcgctcagggctcagaccccaacacaaacaagccccgtgtgctgaagagaagcaggtcccttagctgaggtccaaaggctgtgggtcctgcatgagcctgaagtggtgcacgtccctggtcacattggaggtggagagcttggggatctgaatgtgctgtttgccttggatctttatttgtgattcagaaacagtggaataaaaggaaaggaaagaaaacctgaatggccacctcagcaggatgctccaagggtagtgtccaggtggcactgactcagatatgtgggggcttcccccacccatgctcaagagccactttgccatttcaccatctctctgtcctccacacccctcagcagcaagcacaacaagaatgtgttcaccatgaagctcaaatctcagcagaatctagagtctgaaatccaagtaagggaaagtgtagagcttcttggatgatgccctgtcaattttattttaacgaatgaaagaccagaagaagtcagtcttgaaaggagaggacaggagcatctgctggcattagcagccgtgccatcgtaggaccgactcacctggacccgcggccacctgtgcttttacatctagtcttggttaaccatgggccacttttccagcttggaaactaagcatatgctccacttcctctccttcctcattgaactctttcactaaaagaacagtgcaagagagacttaaactgtttgcctcattcttaagacctttcaggaaaagtgttggcagggaaggaaatctcccagctctgggaaacagtcttgtggattatctgctggtttcattgatctgtgctgtcctccctgcattcattaggaaaactggccttggttcaaataagaacaggatttgtcctggtgacagagaaaggtttcttctgatgtccatatatctccgagggggatgctttctccaggcagaggctgtggccaagcgatcggggggctcagagggctgctgggaaggggtgggcccctctctccccagagggaaactcctggggacctctcgagcacccctgcccatcctttaaacataaattcataaatacaaacaagtaggccattcacagaaatatataaaatatgtcataggacgggtggcactctcatatggcaataattatgacaggggccggcaaatgacctgcgtgacccggagtggcctgagcactgactcccaaatgccctccataggatgttctgcatccccgagaccctttcctgggtcctcctgggccctaccaccccctagaccatccagacctcaggtcatccccctgtctgttgacagagtagtctccgttcctgaatgtgctggtcaccagcaacagcagctgctcctcctccgggaagctcagcctatacttctacatgcagagaacctggacggcacccaggtggacctaagccttcagctcccagtagacgctctgggtttcctaccctgcccagacactctgggcttccccccacacctcccctcggccggggctcctgtgtgcatctgtctctcccagtgcccagcacaggcgtggaacggaagaggtgaatggaccgatttgaacacatcatcctggattctccgttccctctcaagccctgcagctaacccatcggcaagccctggaggctctgcctccaaaatcctgcctatcccatgtgcaaacgcctctcaccacgtccactgctatttgcagttgtgtgtgtgtggaaatacttccacaaatttggaatgaacaggtcacagctgtgcctggagggaatggccagggaaatgtgccctcgccttgctgttctatccaggcccacccagctgaggatgggggacctgccaccactctcctggcagttccggactcctgggaaccggcaggtgaggacccaagagtgttttcagtgacccggctgacctggtcatccgtcagtcccaccttggcctaggcctctatacagcacagatcacagctcattccatcctggcattacactggcctgtgccctgtcctcagggtcacatccgtctcccagaagccgtgcaaccctggaaaacccaggtctaacagtcagcttcctcctccgtgcattaacaatggcgttgacgcctgctttgcggcacgctgggaggggagagggaggtgtatgctggagagctccccaggggcaaggcctggctctgcgtcacccactgtcagatcctgagagcctggggctggcccagcacgtggccaccgttccctaagagttggatttcatccctcagtgctgaaggcaggggatagagcttagacagaccccctgcgtcctgtcttctttatctacagctttctcatccttgcccctttcacgtgcacccggcagagcaggtgttcactgagcttgagcaaaattcaagctagagcagctgatggatcttgaggcctagattcactgtcaaagtgtttctcaaacggtgctctccagaacaccaaggaaaactcattgactgtgtaagtctgaaaatccctgcccaccggtctacctttgtgtatgagcaatcagctctaccattcagcccaggtgtgtgtttgctggaccatgtggaggaagctgaagagacgtgagctgaaggcagagggtgagtccaaggtgggatcttgggacaggtacgagaagttaggcaaaaatgggataattctagccttcataaccttagataatagttcacattattatttagttaatagaactgtacccacattaaatttcttaaatttttttaagagataaagtctcactctgtcacccaggctggagtgcagtggtgcaatcatggctcactgcttcctggaactcgtgggctccagcaatcctcctgcctcagcctcctgactaggtgggactataggcacacgccaccatgcctggctaatttctttgacttttctctagagaccgggtccacctaggtttcccaggctggtctcagacttctagactcaagtgaacctgaacctcccgcctcgacctctcaaattgctgggattacaggtgtgagccaccacacccggcctaaatttcttatgtgccatgggactgcaaaacatcattattaggggcagctggatggaaggtataggaggatactatagtgccttttcaatatttctgtctaaaatctaaaatcatttcaacaggaaacatttatttcaaaacatgaaggtggttatccttccatgagtttgaagtacaaaggcaggctcacggtgtcgtcagaattcagaacgatggtcgtggggctgggggtgctgggaggggctgggcatggttggctttgtgatctggggtctggtgtgttccatctctgaatctctctcgagctgcactctttcttaatacattttcataagtttaaccaaaaataaaacgaggatgcgaagcttgcttgggttgttaagcctagggaaattatccagccatgagccctggcccagatgcttctagaagcctggagggaactgagaactttccaagtggaggccgcagaggcaaggccctgaggtgggagcacactgctgttcgtccctagctctgaagggggtgccctggtcggaatcagtgctgggtgcagcgaaagccgatctcacccgctccgcagggtgttcagcctgccagcagggggccagctggtcctcctgggatatggcacggacccagcagctctgcctgaaatcataatggcggaaccaagggccctctacgtccaggtccgttgggaggcggggcatggagttccactgcaggaatctccaggaaccctgaggtcctccctgagccagggccgggctgggcacaccctgagtgcccacagggtaggtgtcttcccggacagccccaccaggacagggtgtggaagaacgaggtgcccgtggcggggaagctgaccaaatgggccgcgggaaccgggctggtgggcctggaggggcctgcctgtcccccttgcagagggtcttcccgccacgtgaagccggcacaggcctggatgccgacgacccttgctcgggtttggctgaaaggaaaacagacgcggtcagcatctccagtgagcccacgcaggcctttccgggctgggccccacctgcctgcgtctctggagtcctcggggtctctgtgtggcccccgtggcctgacaccgaggacacgcctgtagtctgctgatcccagagggaggggtgcatgctgcctggcgtggggaagctgtcgtggcatggcgggtggctcctgggactgcccccagggttcagactggctgggggcttcctgccacacaccttcgtcccagggctgttgggcctgggatacggcccccagtcagaactcaggtgggaggggccttggatgtcacccagccccttgtcacctcacgtggggacccgtctccgcagtgggtgattgggcccggacgtgggtcaccctctgccctcctgggctgcccagtccatgccaggactgaccgttcccacttctggctgaactcttggctctggctctgggcccggggtcccgcctgtgccctctccctgaatgctctgtgggtcagggacacggattcccttgtctccctggctccaggcttcttgtcctggcaaccttggaggagcgtgcaggagtgaggggcctctgctgctctctgaggctgtgggtgcttgcagggaggggcggggtctcccacaaatgggtctgggctcgtctagtaacttggagggccctgcgagggggagagggagacaccgtggaaagtgggagggggcttgttggagggtcttgcccacatccccctcctgcgtgcacagcatgtccagtatacacgcactgagcgcctgccctgaggaccggtgggcctcctgtactttcttagagtccaggaggaagaggaggaagaaaaggtgaagaggaaggcccaggtagtagggttgcgggtcccgggcactcccctactactgactaccccagagggtgacatgggaggggacatggcactggagcccacctgggggtggcaggtcccccttctttcttgttagtttcttcatagaggccctaagatgcttgagcacagtgtcctcatccctggcccaggtatcaacgaaccggttgcaaaaacgtgcccacgggccacacctggacgtcttcgtgaggcgctctagggacagggtggatatcaggccaggggagttacctgggaatggtcacagctcataccccgtggccacttcagtctcctactgggcggtgccggatccttttgtggccaccccaggtgtccagatatacacaggagactgtggctggggggcgatccggacagggaagtgctcaccacactctcgactttcatctgggtcatgtgggggatgggctcggtgtcacagtgtcctgcccagcccacctggccagacctccctctgggccagaacagaggatcatgaggacagtgtgaggaagctgccctcgggccagtcggggtctgaccccagggctccccaggccccgctgggcacacgtagacttactctgctgaaccttaaaggcgattcttgttatcggcatcaacgcctgttcgccttctaccagatacacgtcccacaggcgcagggtgagcccgagagagatctgtggggacagcaggtgtgaaagaacctggtccttccaggctggggctggtggctcgagctgcgcacactggggcttcagtctccagagtcagtgaccttccccatgagggtcgcctgagccctccaggacgctgggtcagacaaggtcttgaagctcctcatggggggcactcatttgagtggggatgtggctcctggagagaggggcttgcccagggcttgaggcttccctgagccctctcaagtcgggtcctggcccagtctgcccatgaggctgggcctgagccccagccatggccctgggatgaccccccttgggcagagggttttgcttgtgtgtcctttggggacccgcctgagcctcctgtgggctgggagtgagccagacccccgggctggggaagcagggcactgcagggcaaggaaggtccctgagccagggtctccctatgcctccttaccccgtcaatcaatatccggatgaggcagcctaacggggaacactgcccacatagatctttcttgtcctgatggaagcaacagaggtgctcaggccactgggctgccctaaaaacctccctcttccagggcctctgaagacccttcccctagtgcagaacactgggcggtgtccagagctccccacaacactgtcaccttcccacactcccggtggacacactgccctttgccctgctctgcgggagctgggcccccatccctgtgcctctgtctcctccagggcaggaaaggaaaccaactcccagcccatggagaacccgacgtcccaggtcaggccctggctgggactcagccagtcaccagccccacgaggggctccagcccccctgctcctacagtcccacgggaggcagggcctctgggaagagctgaggggaccataaactcacctgatgccccatggtcttgggttgtgacgtggctaccacatgctcctgttggtcttggagcccctggacggtcccgccatttgggctgtgaaatcctgagaagcccccagcccatcatgaaatcagagccttcccccaagatgtggagccatcagctgtaagagctgggcagctggagaggcccccaaaccccaaggcctcccaccctcccatctggtgaccccaacatgcggcctttaccctggggaggtggggcgggaacattccctggagcctggctggaggttcccctggaggcctcctgggccagggtgcaaaaagggcaagcctgactttcaggccacgacagggtggccggaactgggtgggcgctgggcttcccggtcatctcctggtagtggggtcgggccagggaacaggggatggggagatgctgccacctgggcttggtcggcccgttcgtgggcaccgatggcagcaggagcccgggcagctggagggcaggaggactctcagggaggggagagtcagctgcacagaatcagagccggagggcgtggctccaggacacagagggtggccacggggaggatgagatgccctctgctgatggggatgagaggcgtctgatttgggctttgggggtcagccgtggactcctgtgggaccctcagcagagacatcctaaagtctcccaacaagctggcgacacaaggagggtgccttggctgaaagctgtgatcacctggccagggtggccatccccaggtctggctgcaggaggtccccggggcagctgttcacttaccctgcagggagtgcctctcactggccagcagctgcaccagtgcccagaatgcatcctcctcaggaagatagaggaggaacaaggcggcgatgtggctcaggtccctgcagtagcccacctcctgcaagagccagagtcaccatggaaggacatcacctgggagggctgaggtcacccgggaggactcatgtcattggagagggcagaggtgactggagaggcttcctctgaaggagaggcttcctctgaaaaagaggcttcctcaggatgcacattcatttcatgacaagagccaagtccatcaggcacttcagcaccttgtccaaaatgtctgctgatagcaccatcctgtgtgcgatgctgccaagctcctgggctttggggcagccccaggaggagggcgtcatttcttgttctgagaagtggtggtcaggcccaggtgacaccaggagtccaggccctgactcctttgtgtctcagcttgaccccttgagaccacccccttccttggaggtttatgccagcggtgagctgacatcctacctcctatatcctggtgggtcacaaatactaactttaaaagaagcaacgacacccccaccagacacccactcctgtcaatatggaaatatggcccgggaacctcactgccgggaatactcaccgggttgtactcctcatatgccaggaggatgtggagtagttcccgctgcctaggaaacagagaaagggggctttggtttgttttgtgcagatgttgttaatttcactttgtctacaaagcctaacagcaaatcccatttcaggttcagatgtttcaccagataagcagtgagctcttcagggcctgagactcttgaagaaatgtttcagtaaaatccacatctgtgacatgcaaatagcccagttgtacagtgacttgcctgatccttttcactctgaatgatttttttttttttttcagtttgcatacacgccagttcagtctgtgggtgtacagttcctccacggttccaaaccaatgtgcagagtctcccggccaccgctccagcccctcctggggcgactccttcatcctccaagtctccagggtggcccctatgcacccagcctctccccgatccgtcagcctctggccacccagactgcttctcagtccctgtggtttggccttttccagaatggcctaggaatgggaatcctacggtggtagcttattgggtctggcttctgtccctcagcaaaatgcatctaggatccacccacgttcgtgcgggcatcaccggctcgttcccttttctcactgggtcttccgtttgaagggaggaccagccttgctctccccatccccgtgttgaaggccgtccccgaaggctccgtgtgtgagtgacgaggagtcaagcagtgaacctggcatgctggtttcatgtggatgtcagtttgcaaatcagtgggttcaatatctgtgacactttggggatgtgtggttcaagtccatcgagctttgtgagccactgcccaacgggctgccaacgtggctgtgccatgtcatgttcccagcggacctggatgagagtttccaggacccctaattctcccagcatttggtgctgtcactgttgcctggcgggggctcatgggccctctatcctgccaccctcccgtgggtcctaccatgggtccccatgggtcagggagagcacccttcaccattgtgcatgattttgtttgctgccttccatctcctcaggatcctcctgggttctggccccacatgttccagtctggcccagggcttggaaccagggaggtgctcggttcatggtgccggctgctccctgggccgggagagctcttggcagctgtgtcatccctcctgggtgaccctggcttctgctccggggaagcccccatccctctcattcaccccatctctgctgggaccctgtggctcccgtaggcttacttggttccgtatcgatccctgaagaatatatgcttccttaatgtcccgcttacgtcccggtcgatgcgctggatgtgctcagatgacctcttgcccttctccttcatgatctgtagggcagggccaagaggaggaagcagtctcagaacagatggaagactccctgcccccagtggcagtcagcccacagtcagcacttcgggaaggaaggacagaaggaaggtttccttctgcagaaagctgcattttggcttgttactgaagccagggagggtcaccagagctgagtttgtctgtggtgactgtgtcaccatctgtgcccagggtgttcatctgaccttcacccccagctccccagggtggtcttgacgttccctccagctggagacctgggccccgacacggcctgtcctgtttgttgtgctctggctgagcgtacctggtatcttccggggtttttcaacttcatttcctcagtgttcaggaggactgaccacatcgggccccggatgttcatgggcattcccttgtacgctcgatctatgagctgtgggcagaaaacgatctggtgtcacaggccacggggtgaccccagtgaggaccagagcccggggattctggaaattgtcggttttggccccatgattcctcagtagaggtgagatcaagctgggacagggtctcccttcccaggactgaaagagtggatggacactcagagtcgaaactctgatctgaaccttttccttccttcaggtccccagggcatccctagccttgagctccgggtagtcccagccctagattcagattccctccctgcaaggtgacgcttgcacgaataggcaggaaatctggcgaccaggcctgcagtcctctgggcgaggacagtgtgccgcccaccctctgagaggctgatggtgccaggccacagccatgggtgcctgtcccctgtctctgcagagagtgcttcctccctccacacgttacctttctgctgcttttgtatttctcccagtctcccagcatatccacccacttgctctttcggctgatctcccgccgaatttgctgtcaaatgaggcatgttggagttagcggagctgccaggcttcccagagccgcccgcggatgctgggtcttgggctctggagccctggtgggagccagctggaaggagccagggaagggcagacctcaagggctgagagcctttgagcaaatgagcaccagtgggctggctttgggaccccgggatgtaccatcctcaggccacagacacaccagtcttaggtcccagcctctaggtggggtcctgacacaagcgcgcagccacccccaagccaggactgtggttctccttttggaattttatcaaactgccaaagtgaacagcaacctggggtcaggtccagcagggactgctgcccctcccagtgacagcgtgttgccctcacccgccaccgctcaggccagctgcttcctctgcctcactgaccacccgcccagtccctacgtccctggaccagcccctccacgcatcaggctcttaccttcgcctcccgcgcagtcagaggaggcagctccgtctcactgtaaggcaacccaggcagagctgaggaactgcacggggcctggagcggccccagcctgggtgccgacccccagaaaggactggctctgtccctttccagctcagggctcagcccaggagaaggcacagggaagggaggacaagggccttcctgtggggctgactcccaggaggggcaggacctgggagaagaaggagtgtagggacagcctggccggggttactggggcccctggcgtggggggcggtcaggctgcccaatggggctgcccgtcctggactcgaggtggtgctttctgctggagctgagaaaggttagccctgagatgggatgggggccgcccagggtgggcgaccgggccctgacaggagtccctcagggagtgaccacatccccccgccagggtcaagggagcctgccctgagacctgcccggtgtactctggctgcaccaggggcccaccccacttgacagccccaaggcccttgcaggttctgacctcccagcatccacctgcctctccctgcacccgagccacacaccctgcgtttcagaagtggcacggctcgtcagctccctcccgccctacctccccagggatcctctgtctctccatcctgtgatccctgagggatgggctcctggctgggctcctcttacccggccccagatcccttcccagcaccagacccaggtctttagccgcgagccctgctgcctccctggcctcaccgtgagatgcccagaacggggccctgcccatcttctcccccgttctcctagggctacagcccccattgtcaccatgccttttcccctcacgggacagtgagggctgtagctctaggggaatgggggagaacaggggcaggtgggccctcagagacctgctgcacaacagccctgaggctgggccaggagtcccctcaccctgtggccataacccttgcatctcaccgggtttgtctccaagtagacagggccagaccctcaggctgccccgctcctcttgtgctcacttgccgacagaactgctgagcgcccaggggcctgacctagcccagtctccattcccaccggctccctagatgggccccacacctctggcctaacaacctcgggctggacctgcaggggagtcagggaggagttctgtccctggaaaggaggttgacccgacctggtgagacatgtcctgcgtcagaaaggcctttctaaaagcaaacccatccctgagctgagacaggtgctttaggggtgaggggagtgcagaggactcactgtacaatccccaaatgatcgacgttgttgttgtagcttcgaaaaggcttaggccccttgtcctctggcagcccagctcggtgtccctgtagcccagagggagccttggtgaggggtccaaggtaaagggtgcaagggcctgggggcattggccacccgtccctgccctgtgctcctagggagcccaggaccctttgaccagggcacactggaagaggcctccctccaagaagcagaccgacttgtaccttttcgtatttcataatgatgtcctctcgctcttgtgcccaccaactgcccgcgacctctaccacgtccatcctgtgagacagaattgtctaaaggtcacaccgtacgcggcggcttcggagaacacctgaaccgctctcgccgggctcccagatgctggctggctgcgtaacccccattccaccgccgcccccagggaaaaaggggccagacccagtggcccacagctgctccagtctctggagtctcaagtcccaagcaggggtgggcatcttcccaaggacttgagtacagtgggacctagacagagaatcctgttgtcccccaatgccatgaaatggggacacactggccccagcaggttgaatggtttccacctgccaagggtgaagggcccatgatgggctattccagggatgtggaggcagactggggtcagcgaccagaggtctctgtgcaatcggcctcctgggatgctcagggcctcagcgatgcccagtttcctacagggaacaagatctctcccgactgctcggttctactccgctcatcactttggctaccgtggctcttcagtctgaacagtgaagccactttaggaataacgcctgttgagcaggagggtgttgggtttgggggatgagaaagatctattgtacgcatggaaaccacgtctctcgcggagggactgtggagtccaccattctgagccgtcccaacaggaggaggcttcattttcctgggtcactgaggaagaacagtgggtccttggtcctggagaacagctggatggaccgtccctcctgggaatactcgaggcaaaaggagggcgaggcctcaagaggaccacgcagagcaagaaatacctggggagaaccctagtgcccggacccctttgaacacaagggaagatagtctcccctcagccagccctccagggctccttcattttccacagctgcccaagggcagcaggctcccccggacaagggaccatgtgtgttcagtggggcccacagcgaccatcaggacccagcttagggcacagaggtgttctgaggaccgtcagtggctctgtaccagtggctctgccaggaccaggctctgccccatcgggatgggaaacctgggcagatttgggatctagggcagggaggtcacagggttcaggcctgaattccagcacagcacacggcagggctgagagcaaaactcagggtcatgtccggattcccaggccggttactgcctctctgaccccagacgtctcatctgtcgaatggggacatttgggaacagcacccactctacgaagccaccatggagacgaaagagccaatcgtctacacgggcagtgtagaacgggcgcctggtgagtgctcagggatgaccctcctcggtagctgccccacagaggccaacaccgcccgcaccgtagccactgcccccaagtccgcctggagggaagagagcaggtcacgctcacctgattctgatgaatcagctggcctgggtcatgcctctcagggagaaaacctttgagtccacagagctgctcacagataccactgcctgtgtgtaactgctgtagaccactgaggcagaccagagagcagataggtgctaagcaccagtgacattctgaggtcatggcacgaatcacagtggggccttgcccgggtcagcagcgcccagagtcagggtcctccgctgcctgaggcgtcaacatgcctgcctgcaatgtgtttgtgcacgtgcgtgcacatgtgtatgtgggtaaacacatctgtgcacgtgtgtgctgcttctctggccaggcccggctgccccactcatgtgtgcacccagttcctcatcactgtcacccccgaggcccagggccagcatcagagcatccatggctgctccctaacctcagccctccccgcccagggtggtcctgggatacacatagcggtggagggaagtgactgctgctgttggatctcagaatacaaaagctagtactattacctaatggtctttttagtgtctctaatggtatcgctttttcatttctgatattttaactgggtatttctctccatgacccttggatattctagctagaggatcctgtggggaaagtgccgggcacacagtaggggctcactcttctagacatgttatctaaaacctggttcatctgtccttccacacagggcctaggggatgccaaattccaggggccagaaagagcttgggataaaaagaaacttcaaggggacggctttgacctgggctgagtctgcctgtgccatccaactggagtctcaagtcctgaggcaggacgtccagatgccccagtgcagggtcctcctgatcaacacctgctcccctgtactcattagcaacctcacccaccctactctcaaagcacacttggctctcgtatccaggagctctgcatctgtagattcagcaacagcagatggaaaatattcagaaaataaattggacggttatgtttctattgaacatgtgcagagtttgttcttgtcattattccctaaagaatccagtatcacgaccatttatgtagcatctgcattgtattacacatcatgaataatccagggatggtctaatgtctacgggaggatgtgcatagctgatatgtaaatactaggccatgttatgtcagagacttgaggatccatggattttggcatccccggggaccctagaactaatccatggataccaagggatgactgtataaactcactcaggaaggcttctcattggaggaaggtcccagttcaggacacacagggacatctccctggactactgtccattcatccatccattcatccattgtctccccccacccccgcatctcggactgtcccagtgacagccctagcaagaagagacaagaaacaagttcacgttgtccagttttgaggtaatggaagaagttgcaccagtatgagaatagtgggtcagttttctacaggatgcagaaagcatatcgggcagcctcggggtgcggaaaggagcctggcctctctagcagccacacaggcctgcagtaggatggggctgtggctggccatgtggatcacttgggcctcatgaggggaaaggaaataccaggggggcagaagaggagcatgggggcagctggttgcctaaggagaaggcacctcagggaaggggactgtattcatttgttttcacactgatgtaaagaaatacctgagattgggtaatttataaaggaaacaggcttaattgacttgcagttccggaaacttacaatcatggaagaaggggaaggggaagcaggcaccttcttcacaagacggcaggagggagtgagtggagaaccagtaagtgccacactttgaaactatgatcctcctacctcagcctcccaagtagctgggactacaggcacatgccaccacacccagctaatttttgtactttttatagagacgaggtattggcatggtgcccaggctggtatcaaactcctggactcaagcagtccacctgccccagcctcccaaagtgctcggattataggcatatcagccagctgatggagcatctttaatatcatatttttactgtaacttttctatattgagaaatgttcaggtatacaaatactactgtgttataattgcctatggtattcagtacagtaacatgctgtacaggtattttgtagcctaggagcaacagggtatataccgtgtaggctaggtgtatatagcctaggacatactgtgtaggtttctgtaagtacattctatgatgttcacatattgatgaaattgcctgacaacatatttctcagaacatatccctgttgttaagcaacacatgactattcccttgattttttattttttcagagacaggatcttgttctgttgcccaggctggagtgcagtggtgccacgattgctcactgtaacctcaaactcctgggctcaagtgacccttcccacttcagcctcctgagtagctgggactacaggcacataccaccacacccggctaatatttttgtattttttgtagaggtggggtctcgctatgttgcaagctggtcttgaactcctgggctcaatcagtcctcacatcctggcctcccaaagtgctaggattacaggcgtgagccaccacacccggcccagactctttaagttggcaaaatattcagttatggaaagcagaatgctggaggatgaccaaagggataatgagtcctgattcatgttgaccctatgacttactgcaggttgagtgtcccttatccaaaatgcgtgggaccagcaatgttttgaatttcatatttcttttggattttggaatatttgcattatacttactagctgagcatctataattgcaatatccaaaatctaaaatgttccaatgagcatttcctttgagcatcacgttggcactcaaaaagtttcagattttgggtgggaattgaacaatgagaacacttgaacacagggcggggaacatcagacaccagggcctgtcatggggtagggggctgggggagggatagcattaggagaaatacctaatgtaaatgacgagttaatgggtgcagcaaaccaacatggcacatgtatactgatgtaacaaacctgcacattgtgcacatgcaccctagaactttaattaaaaaaaaagaaagaaagaaaagaaaaagtttcagattctggagcatttcaaatttcagattagagatattcaacctgaacacagcttcaaataaggctaatttatttattacatggatcctgaccttgagttaagtattcagaacaaaaataaaatgtcccagcctggatagagtgacaatactttctctccatttctatctcaagctattaaagattacctgcggcagcattcttttgttggaacttggttaaatacatgttcattcctttcttaaagtcctgagaaaacacaatttttaaaatccagggaagtcagatctcagaatttatagtatatttgtatattagtaatcaaaaacaaatttactcaaatactcaagtatcagatacactgaaacacatatatccttctgatgcctactgccttttatttaataatgcgtactctatgccttctattcttgctcttaagttttataacagcctcccatttccactcccaaacacacctgcacatcactcatctaagagaccacagtagtcaacttcaaataattgaattctcattctttttggtcattaaaaaaaatgacaagccagaaactatttgggaacttaatccaaataaagtgagactttttttcatgcaaaactcttatgatttcaccatgaaagaatgaaatacttaaagttttttttttttaccttatccccaatgtagtcatgcagcattcggatgacagatgcacctttgctatatgatatagcatcaaatatctcatcaacctcagatggatggcccacactgacctggcagacagtgtgattcagggttatgacaggaagcagatagcctgtaatactgaattacataaaacgctttctaggaaaacccttctaacttacatttttctgcctttaactcactcataatgtataacgatggtcctcaaaaaaatgtagtaactaataataataaagttgaatagaacatgattcctgtcatcccttagagcttgggttccagtcctggctttgttctgctgggaaagaagccactatggttctgtttatttttggggtagttgcagaggagtgatgaggaagacatggaggtgaagaacattagatttcttgcactaattgtaatgaattacaattatatgggagcctaattaaatatgttgaagtaggattataactctagttctttagatacaaaatttatatatataaactgaagtagggataggctaagtcaagagaattaaagtattcacaaaacagaccctgacaataaaatatgtccagaattttccttgacataaacaatggaaccatagtgttacccaataggtatgacttctcccatactactctttttcttttttttggcagagttttttgctcttgttgcccaggctggagtgcaatggcacgatctcggctcaccgcaacctctgcctcccaggttcaagtgattctcctgcctcagcctcccgagtagctgggattacaggcatgcgccaccgtgcccagctaattttgtatttttagtaaagacggggtttctccatgttggtcaggctggtctcaaactcccgacctcaggtgatccacccgcctcagcctcccaaaatgctaggattacaggcgtaagccactgcgcctggccagaccaatttttttttactgcctacctttaaaagaaatgtttaattagaacttagacttactagcttttcaagactagaaatatgaaccagtaaaatcacccatgctattttctcttcttttcaaagtccaaagtacctatgtaacaaattacgtatttcattgtaaatgagagcagtcataggctaatggttagaaagtatggctcacttcaataggatggctgttatctaaggcgtcaagctcctgggcacgggtgtaatcagcagaaacaaactgagtccaaatatcatactctgggaagcagtggtctacacacagatattcaatccaggatgcaaaaccttcatttaaccaaagatgagtccaccattcctaaaaacagaagatgaaaatacttaaagaaattgaaatgattgtcattctactaatctaaaacactcacatgtcccttccactatattccaaaactcacaatttaatgacctaaaattcagttcaaaacatttcgcaaagaactcacatttctgaaaaagagagaagactaaaagagatgtcaagaaaggccaactggtgatattagaattatatctgagggtcattttcttttcctttctttttttttttttttttttttttttttgagacaaagtcttgttttgtcaccaggctggagtgttcaccagtagctgggattacaggcatgtatcactatgcctggctaatttttgtatttttagtagagatggggttttgccatgttggccaggctggtctcaaacttctgacctcaagtgatccacctgcctcggcctcccaaagtgctgggattacaggtgtgagccaccatgcctgggccaaaggatattttcaaaacattgtaaataacttctcccccaaacccagacagggtctcattctgttgcccaggctggagtggcaggggcaccatcgtagctcactgcagccttgaacaccggggctcaagcaatcctcccgcctcagcctgccaaagtgctgggattacacacgtaagccagtgcactcagtcctaagtaactttttaaataccaaaggtagaaaaggaagaagagggaaaaaaaaaataagcccatatatggaaaaggaaaagacagcagataaatataggcaaatagaggtggaaaatataatcacgtagaatttagtatagtaaaggattatctctgaaaaacaaaaacagaaaactatcagagccaaataaagaaaaatggaaatgactggggaaaaccactcactaatgagttgaatgttcaagagaaactgagaaagagtactgcttatataaaaattatgtgaaattaaacaaaaatgtagttcagtaatgaatggtgtttaagcacttatggaatatgaaattatcacctgttaaataagaatgcatagtaaatggaatggacaaagaatatgagtgacagataaaatcagtttttaaaaaattttaaagatcttaatctaaattttattaaagttgattaagcctattagtgaaagaaagcaggccaggcacaatggcttgctcctgtaatgccaatactctgggaggtcaaggcaggaagatcacttgagcccaggagtttgagataagcctgggtaacacagtgagactccatctctaaaaaaattaaaaagtaaaaaaaaattagctggtcatggtgacacacacctgtggtcccagctacttgggaggctgaggcaagaggattacataagcccaggaagatgaagctgcactgacccatgattgtgccactgcactccggcttgggtaacaaagtgagatcctattctccatccccaaccagtccccccagaaaaggccaggtgtggtagctcatgcctgtaatcccagcactttgggaggctgaggtgggaggattgcttgagcccaggagtttgagaccagtttaggcaacaaagtgaaaccctgtctctacaaaaggcaatacagtgaaaccttgtctctacaaaaagtgcaaaaataagctgggcatggtgccacacacctgtaattgcagctactcaggaggcagagacaggaggattgcttgagcccagaggtcaagactgtaatgaaccatgattgtgccattgcactccagtttaactgacagagtgagactctgtcttaaaaaaaaaattattttgatattaagtgataagtggctatttgcctagtagcttcctaaaataaactagcataaaatgaaacttattttccaacctatccctaagcccttggaatttcagttctaataactagaatagttacataaaaccagtaaaaagttgtttaataagaatgtacacatttcccctactaaaatttattgcttgtagtttcaaaataaaatcataaagttatctcaaagccaagcaaaaaaattatttggtacgaagtagcaaactcgctgcattagaagaaaaggccatttcttcacatatttgaatacaggcaccaacacatagttccacatgaaattatatttcttttttttttttttttttgagatggagtttcactcttgttgcccaggctggagtgcagtggcgtgatctcggctcactgcaacctctgcctcccaggttcaagcgattcttctgcctcaacctccagagtagctaggattacaggtgcataccaccacgcccagctaattttctattttttttttagtggagatggagtttcgcaacattggtcagggtggtctcaaacacgtgacctcaagtgatccacccgcctcggcctcccaaagtgctgggattactggcgtgagctaccgtgcccggcctgaaattatatttcaaagaatttttttcacctgtaaaattttaaacatccaaaataaaaggaaaagatttattttcaagggttgactttctgtagaaactctctgagacacgtaacagttgataaatgtcttacattcttatttatataacgtatggactcaatctacattcaaatcaggttctgctctttggcagcctaaaatgtcagggaatctagctggctccagaatatccagttatttaattgcagaggtacatctagttcacttattaaatcctgtgctcccaagctctaacacagttggcattcataaatagtatttacttagagtaagagtgaaaaatcaggactgaaggacagagatcattactgcaaacattataaggatttcaacagaacagctggaattttaatacagctttattctgcagtcactctgcagtttgtttacttttatttcattaaatttcaacttaacattttaggcaatgaaaaaactgactcctaaaaacatttctctctaattaaagatcagtctgttattcatcaggttacttttcagctgtgagtcagattaacaaataagattcaagaaactacagttagcctggaatctcactgcatgattcattcatctacacctaagaggaatcttttcctctcacccaaattagtatcttgacttttcccatttgcagacaaattttagaacagtttaggaagtgtctgttgaataaagactgtccatatgcccttgttcaatgcagagattctgataagccctttcaaagtggaccttttaaaataatacttttctatcactcaattattttttggcacagtgttgcagccaaacttgaaatactatgtagccaaaataatgtggagtaggatgaagataaatatatttgagcacttaaaaatattaaataccatagtaacaagatttccaaaccattgatgggcaagttcatgtcccacaaccagagcaacccactggcgggatgaagaacaggaattttttggatcaataagcaatgcagtctccctatgtttaaaaaaaaaaaaaagagaaacaaatttaaacaataaaagtgggcatgcataagttgggaagattcagacagtaagtcagatggacaagttaggctttagagatattaggaaaatatttcctaatatggaaagaaaaagtttcacgaagattaaagactaccccaacagaattaatacaacagaatatcaaagatgtgacacaagtttaattatcagtttgttgatagaatagctgcctgaaattttgggaaaacattgtctaagggattagcgattactgtgctagatggagagagaagaaagtcctttcattaaatgaggggagtggtggaggaagatgcattccatagtcccaaaaacagcactgagccggccgttcaacacttagctcatctaagaaggcaattgaaagtagaaggcaaaaacttgtttacagacagactctgcttttaaaagttattcaactcacatgtttatgttgtggtgacagacatgtaaaaacttggctagaagatatgaaattagggaaggttctccaagctggataaatagctgtgaaactactggcaggaaagaaaggcactgcaatgagaaacttagccaagaatatatctaaaaatgctactaccgccagatgctcactttaaaatcttacaccctcagacagtagcaccaaagggagaggtgtccatctgcattcttgaaatgtgcatggaagtgggggaaggtagaaaaatttacaccatatcgtaaagcagaagctactcaactgtgattaggagggaagcccttttgaaatcagtgatttgaaaagataaggcagggtaatacatcattaacatacctataagtaacaaggtcccagttctccatggcaccttcacaaaataaatataaacatttattgagatatatatatatatatatatatatatatatactcttgcatcaaaagtcacaaaattttaaaaagttattacaattcagcaataaaatgaaatttactttaccagctgcaaagtctgcaatagcaatgagatcaattttaggtagaggataaggaacattgaagtagtccttataaaaaggcaaggttttagcagcaacctataaaagtataaacaaaataaccatctaataaatatgttattataattcatattgaaacccacaaaggaatcctgttgcaagccaatgtatcttaaattactagaaatgaatcccagggagccctacctccgaagactgccttagctccaaactttgaatacaatggccaaactttaatccatttataacttgatatgaaaaatataactacatattttccaacccattccctagagaaattccactcttatattctcttaattattattttgtaaaataacgaaacaccaaggttggcatttcctaaattctattaaaaataaaccaagtagcacaactttcagattaaattataaataactgtactaataattgaccagaaatgtaaattccccaacctggagttatggactgctggaacaatcctcttcaagtacatttacctctaatgcaaattttccttgttctgctttgccaacaggagtgtaaacacagacacacacaccatcttttgaccttgtttctacaaagtcatattcacccacaacaaatgccaccagatatgtagatgtaacaggtgtgcgggcaaacttcacttccactaaattttcatcatcagggtatggtttccggtcaattacattctttaagaaagaaaaaaaagaaaaatttaaataggtttacattaataccatagagcaaataccagccaaaaactgtaggctttattgcatctctttccccctttctattctagcatggcttatttctctaccccaattcatccagtgcttttatgctgtctttaagaaggaaagtggtctgataaaacactcatactaagaagctggaggctgaagtgttaaaactaccaaggacctgtgagagaaaagaggaatggacttttctcgaatacttattataagccaggcattgggatgatttaagtaagggcttcatacttttcaactgacataagtttaggagaaaatgactattaataaaaataaaataggggccaggcgcggtggctcacgcctgtaatcccagcactttgggaggcttaggcgggcgaatcacaaggtcaggagatcaagaccatcctggctaacatggtgaaaccccgtctctactaaaaatacaaaacattagccaggcatggtggggggtgcctgtaatcccagctacttgggaggctgaggcaggagaatggcgtgaaccagggaggcggagcttgcagtgagctgggatcacaccactgcactccagcctgggcgacacagcgagactccttctcaaaaataaataaaaaaaatataatataattgtagaatctcccatttcaaaggatacaaacttctagatcgagggcattctctaccaaagttggctctaagcttatttgtgaagaaatttcaactttacctttggagtccctaatttcctttggtgttctccctctttttcctattcaggctccatttcctcaagctctctctattcttccttccaaggaagacttattcaagaacacactgataaattcactcatactaaagtgtgaatgaatatttctgcttaatgtattagcctcctcttctaagaatatgtgtgaagagaatgacattctatttatgggatgctctcccccagtaaatacataaaagagttattttcaggtgcagcaggtttttccaagttccccacacaagacagtcctagacaacacacttcaagtggggaatgcttaccctgttcatgaatgagatcaataacactggtgaagagaatacattccaagaatacaaacagccagaaacctaaatatacttcattatgcagctacatcttttgaattcttttaactttttaaaaagatagagacagggtcttgctctgttgcaaccttttttttttccccccgagatggagtcttgctctgtcacccaggctggagcggagtggcgcgatctcaactcactgcagcctccgcctcccaggttcaagcaattctcctgcctcagcctcccaagtagctggggttacaggtgcctgccaccatatctggctaatttttgtatttttagtagagatggggtttcaccatgttggccaggctggtctcgaactcctggcctcaaatgatccacctgcctcagcctcctgaagtgctgggattacaggtatgagccaccatgcctggcctattttttttttttaagagatggggtcttgttctgtcacccaggctggaatacagtggcgcaatcatggctccctgtagcctcaaactcctaagttcgagagatcctcccacattagcctcccaagtagttaggattacagacacctgccaccatacctggctaacttttaagttttaaatcttttgtagaaatgaggtctcactatgttgcccagactggtgtcaaactcctggcctcaagcaatcctcctgccttagcctcccaaagcactgaaattacaagcaagagtcactgtacctggctttcttatgacatttaataagtcaagacctttttcttttttttttctttttttttctgacatagggtctggctctgtcacccaggctggagtgcagtggtgtgatctcagctcactacaacctccgcttcctgggttcaagtgatcctcccacctcagcctcccaagtagctgggactacaggtgtgtgcaaccacactcagataatttttgtatttttagtaaggacaggatttcaccatgttggccaggctggtcttcaactcctgacctcaagcgatctgcctaccttgacttcccaaagtgctgggaggacaggtgtaagccaccatatccagcccaagacttttgcttttagttactataaatctattaaacttgtcaatttacctctctaaattaaaagaagtagataatcttataaatgtatttaacaaggaatttgacaaggagaaaatcctccaaaaataaagctatcaagaaaaagaggtcttggctgggcatggtggctcatgcctctaatcccagcactttgggaggctgaggcaggaagacagattgaccccaggagtttgagaccagcctgggcaacataatgagaccccaagtctacagaaaaaaaaaaaaagaaagaaaaagaggcttattgaaaataaagaaaactattatttatgttcctataatataccagcactgtggtaggtggtttcatattatcccatctaatcagcaaactaaatctgctaaagcctattaaaattttagataaacttataaacacatacataccatgtttgataaagctactctgtctttaggaacaaccaatgagatatcaaaagttgctttgatagcaggctcatcccagcaaggaaaagcccttcgggcatcagtagccttaagaaaagaatatgaaatataaataccttagaattaacctaacaagttatttcataaagcagtcgccatttccctctgtcattcattcattcccttgttcaaatatttactttctcttcagtgccaggcaacaagctaggcattaactagaaagaaaagacaacacttgctaccactgccattccagcaaatatccaggaacagtgtctgctatggattttaacaatatattataattatttacaactaaatttttgtttacattttaacatttcaaatttaatgcaaatgccttcaaatcaataatgttaacacaacacagagcacagaacagtaaagagtatgctataagaattcaaagttgggaaaacatggtaagttgcctctctggcttttatttttgaattaaaaataaaaatattctcaatctttgatgtgctttgttcttcatctggaatggcagcaatgggaataaagacagatgctctatcaattcaagacaggtcattcatttaatggcacttccatatgctacacataaaactgtcgccacttgacctacttgagtccttactctttcattaaaaatttaaaaaagagcaaccttatgaaagcaaaataaaacttaggggttctgcagggtatcagttataaaggaaagacacttcagtaaacagaattttccatttatttagtaaataaaatggaaccaatgacaagatactgtatcataaaaagaaacaacagactgggtgcagtggctcatgcttgtaattccagcactttgggaggccgaggtgggcggatcacctgaggtcaggagttcgagaccagcctggtcaacatggtgaaaccccgtctctactaaaaatacaaaaataagccaggcatggtgacacatgcctgtaatcccagctactcgggaggctgaggcaggagaatggctcgaacctgggaagcggaggttgcagtgagccaagattgcaccactgcactccagcctgggcgacagagcaaggctccgactaaaaaacaaacaaacaaacgaacaaacaaacaaacaaacaaaccaaagaggtagaagaaacttggctgactacattctcaaaaacattaaataaataatgaattctatcaatgaataaaaaagacatctgaaaagaagggagagtataaggaaagaaatggcagcacagaagcatttaaattagaagcagcagcagtagagaaatgaatttatactaaaggaaattaatgacagataacaagatttaagtttgaaaatatctaaaggacaaagtgataaaagcaattaaacataatttgagagacagatactagagctaaactgagtattaactgagaagggaatggaatggatatcacagtgaagatataacagaaaaactctttcacactgaaaaattacctgaatctaaaaatcaatagggttcaccaagtactatgcaaaaatcaatgaaaagtgaacacctggtttaaaaaacagtttaattttcgatatcaagatataatttaacaagcaagcaggaagaaaataaagcaaaacgaaacaacatcttacctacaaaggaagaagaaacattttagtctgtgacccctcctcttgaaaaagtgagatgtagaagactttggaaacaatattcacagacttttgaaagtgaaaaattgtaagctgattgtactactcttacaattgaatgagctgggcctattactcatggcaagagagaactcacaccacagggaaccactggtgtctccataagaatgtaagaaagaacccactatacgatttgggatttggtttacatgatttggaagagggtctaagtaaacagggattcactctagattgagtgctgcaagaagtcctatgaggcaattctatgggtatgtatctcaataaatcttatctatacggaggccagactagagcaaatctaaaaccgtaattggtaaagaagcagtagtcactcattttaactgagagatggagatgtttgatattttgcgggtagcatagtgatcctgtatgtactgtacctaggcaaaattatggatcccttgttttgtctcactttattatggtctcaagtagccttgtctaaagttggtattctgtaatattatgtctaatagggagaataacacgggctagctgtgagtgccagacaacctctggatgtcaaaagttgctctttttaccttttttcatcaacaaatctatatacccagtaaatctggtcatgtataaaggcaaatgaaagatttttcagaaaagcaaaggtttaggaattacattacccacataccttctcctaaaaaaaaaattgtttagagacatacatcagccaaccattccaggatgaagtgttcaaagtgggtagagaaaggcattggaatcattcaaacacagaattaaacctaaatatctgtggcaaatattattctaaacagaaggtaacataaaattattgaaagagaagatacatcaggtaaaacaaattagtagtaaactggataaaaaattttaggttatcccaaacaagcaaacaatatagggatatgggcagaaacataagaatggatatcatgaattgtttctttatccatactgaaatttatagaaataaatttaattagatttaacacttaaaaatacgactagcagattcaaaacaatttatataatttgcaaatacctgacaaataaaaatcatcctggcctacgtaggacagcaaatatatatatgtgtgtatatatatatatgtatacacacacacacacacacacacacacacacacagagagagagaaaaaaaatcaaagacagcacagatactacagtaagataaacaaaagatgtcaaagaaggaaaggaattctagaaaacagctaataatactgtaggaaaagccataggtgtcaaatactaagagaatgattttaagaaaggtacacagtatataggcaattcaggtatcaaaatgtgtcgtgtgtttgaatgtctgtgtgtataactgtatataatcattccccaacccatacccttaattccctcctttctatagagataatggctaaatataaaataaaaattctaaaattgtgaatacaatcatggccaagggcacctagcctcaaataatcaccccacataataaacacacctttgtcagaatgcctaatttaagaataataatattttagagaagaataacccatacctcaaactgtgttacagcagcatagggcacctctccagaaggggtagtatacttacttctatagaaacctttcattttgtcattcagctctccaacaaaatctatctttaaggttcctgtacctgtgattgaagataaataaaaaacacttttatggagatgttaaacacagttaccaaaaatatgtcctcaagacactatattcagttagctatttacaatgttcaaatcattccttcctttttcaaatattcctcctggcaatggagagaatacagtacttactaaagtaaaaggcagactaatcctaaaataactcttgaaagtcatgtttagggtgactgcctaaaaagttattaacttagtctcaaactaccaatatgtgaaaataagaacaggaaaggaaacaaacatttattcttaaatgcctgatatgtgctattgtgcacagtgcttttaaaatatatataactatttataaacctggaagtagatattgtcctcattttttcagatgaggaaactgaggctgagaagctaaataacttgtccagtgtcataaaattagtaagtagtgagaatgggataaaatgttaagtccagaattcatgctctctgccaattatacatgtgaattggtccttttacacaacttcatgcatagaaagagaaatgtagccaattactctatcaagataagacactaaatgtttactccaaatggaacactgattgcataattttgtaaggagctatagggaagaccaatgatttgatcagcaacagggcataaaacaaattcttacaagtcacctcaatcatttgaaatctgacaaagaaatacatttaattaataaattattaaatgcaaataaaaatacaacttaaatatgtattctattgtataagagcaaaaacaatttagacaaaaaagtgagcttttttgagtttatatactttcttttttataacataaaaaattataattattatctagtaatcatctgctaaatacagatgcatggcaaaacagtaatcccattctgtgttttacaaatcaagtcacgaaaaaacgtagaggaatggtgactttttagttgaccattttaaaggccctacgtatatcaagatttaaagcatgggaagtctaacaaatcaaagatagggcatgactataaagtaattaaccaatcataccaaacttttatatcctaatgtttcaaattgtcattttggaacgctaaagagcaatgacatttgacattgttcaaaatgttgtgactttctctttctctctctctttttttttttttgagacagaggctcactctgttgcccaggctggagtacagtggtgtgatctcggctcactgcagcctccgcctcctgggttcaagcaattgtgcctcagcctcctgagtagctgggactacaggcgggcaccaccacgcctggctaatttttgcatttttagtagagacaggggtttgccatgttggccagctggtcttaaactcctggcctcaagtgatccacccaccttggcctcccgaagtgctgggattacaggcatgagccactgtgcccagcccctctgacactcttttgaatgatctcaaagtcaaatcttcatcttataaaattgaatttgcttttggaaaggaccaaaagttatggggagtgcgagtctacagaataagtgaatgacaaactacaaactgtctctagcctgatgcctcaaactggttctgaaagtaatttaagtgaaaatttcagacctttagagcaaagtcaccactaatgaaagtgctatattcttaatcattctgagaaaaaaacaactcaactgaagcttaattgaatagacatttgtgatgtttattttttagaaatcagatatttgtaaatatctaaagaggacaatgaatacttttttctttaaagagaatgacaggttactgggacagtatatatggatatagtaaaataattgataattctaaatgatactaaaaaattaaactataaagcaaaatttaaattaaaaatttttaatttctattttctttagaagttcacttaatttttttaaaaaagcaaatgtattcacattaataaagtttgcaaagaacgtctaacagattataaaaacctactacctttaatggaaactatatgatggaattttatgttacaattccataagtggaattgcccagtctgtttcactaagtcagtcaactgttaagatgttttttaaatataattcatatttcatggtaaatctacttgcattttttcctagttggaacataagtggttttaaaactcataactaaataagaaagactgcttacacttttactcggttttaaatctccaaggccatcaaaccataacaagatattgacagtgaccacttccaaaaagtggcatactaaacaaaatacaaagtattggaaagagttattacctgaaattcaaacaaaacacaagttaaagtatttaaaaatcattaataagtttaattagtgtcacattatatgataccaattacaaagtatttacttactattcatatagtagaattttagggcaagtaggagaaaaaatgactttttaataaatttcatttatcaaatttacaccatattaatgaacggattgccaaattgtctaattttatacctatcaacacacataatttacaccacttcctcaaattagataccttatttcatatccaatgtatgaaatatttatgtttggggttgtaaaccttttgaaacatacatcaagctcgtttataaagtaaacaactgaaaaattgggacttccatcaaaaaccttaaatgtttaaagcttaggagagtataacaattgtaaaacctggagtaaatcttgaaatactttaataataagaaatttaatgagtctactaaatgctataaaaataaagagattaatttatacaaaaagggaataaagatcgttgcctttgtgtcaccacctctttttttctttggaaaatggagtctcagtctcagtctgtcacccaggctaaagtgcagtggtgcaatctcggctcactgcaaccttcggctcccgggttcaagcaattctcctgcctcagcctcctgagtagctggaactacaggcgtgcgccaccaggcctgactaatttttgtttttagtagaaacagggtttcgccatgtgtcaccactttttattatcttgtttttgactcttcaaaatgctgacaactaccagtgtttctccatataaatgccaccctcaggaccctcagccactaattctaaggttgttagaccttacaataattatggtaatttaatcactatcccagaatggtgccaatttcagaaaagtaggttttacttagctgtataatagcttgcattactgttaaatttgatgaggctaaacacaaaggttattaatgtcctcctaagataagctcagtatttgcttcattatcagatagatcacttgtgcaatctgtcttgaaaaagattaacttcatttttaaagcaaaccttgggaaaatgtgaaagccaatggtttcaaacagatattcaataattcaatattgtcggctgggcgtgatggctcacacctgtaattccagcactttgggaggccgaggcgggaggatcacgaggtcaggagatcaagaccatcctggctaacacagtgaaaccccatctctactaaaaatacaaaaacaaaattagccgggcgtggtggcgggcagctgtagtcccagctactcgggaggctgagacaggagaatggcatgaacccaggaggcagagcttgcagtgagctgagatcgcgccactgcactccagcctggacgacagagcgagactccatctcaaaaaataataataataataattcaatattgtcacacctgcaagataatttttctgttctaatatttatatcagttgttatattagctcaaaattgttatattggccaaaaatatcaaaaattatgttaaatcatactatactaatggtcataaccttctctaacttgtttgttattatttgaaatagcttcaccatttagcatgtctgctgtaaacagaccttatcaagaatgatacatctcttatatactagtaataaatggcctccaatatttacagttaaggggaaaagaagaaaggtgcagaacattatgtatggcatggtgatttctgtgttcttaaaaagtatatatataaatgcttacaaaagcaggggtatagttttgaaaggaaaatttcatttcattctgttgaggaatggagctgagaaagaagacagggtagactggcaaacaaaatttcattgcatagcatttgaatttcaaattatgtaaatgtactatgtttttgaaatatttaatttgaaaaataaagatagcacaatgtggtggttaaaagtgcagacttttgagttaaactgcttgggtttaaatcccagctatgttacttactagctatgttaccttggacaaattatttaagttactgaaatcatttttctgccttagtttatctacaaaatagaagtaacagaatctggctggcgtagtggctcatgcctgtaatctcaacatttgggaggatggcaagatcctctctctgaggtaggaggatcacctgaggccaggcatttgagaccagcctaggcaacataacgagaccctgtctctacaaaaaaatttaaaaattaaccagatgcactgtcatgtgtaggcagtcctagctacatgggaggctgaagtgggagaatcacttaaacccaggagtttgaggctgcagtgagccgtgactgcaccactatactccagcctgggtgacagagagactttgtcacaaaacaaatctacctcaaaaggttgttgaaaggactaaataaattaatatttttgaggcacttaaaacagtacttggcacagattatgtcgtgtgtgtgtgtgtgtgtgtgtgtgtgtgtgtgtgtaatacatatcttctatcatgttagaagtttctgtctactcttccctggtgaattctagcaaataaactgattccttttgataaatatagaatgtttaactttttaaatttaatgaaaaatggttaccatatttcctaatgctgaacaacaattcaatctacgcttttattttctatactggctaggtttatatatcttttgggactatttttaaatatcagttttttaatatttctgcccctcacttcacttatttcatttgtttctgctcttaaaactttcttctactttctccaagttaccttttgtttttatgagtttaatgcttagctaattaattttcagtctttcttcttaactaaatattctaatattttatctgcatatgaaacatgtttatccctaatgtttcatatgtggtaatttcattattcagttctaaatattttctaatttccataacaagtcttctttgactcaattattcagaggtataattttttcaaatatataaaaagggatttttttcatttctctttttctattgacttctaattttttcacagtgtaaacacagaatatatatagtctgtaatgatatagatttaaaactctaaaattttttaaatttctatcaaagtaatagttcacagtttaaaatacgtaagctccaggccctgctcaacactaggccctactccccacaccctgcccctagaagcaatcaatttcaaactctgtgacttctaaatgtcttgcttacacagctattttttcttttcctttctttgagacagtcttgctctgtcgcccaggctcgagggcagtggtacaatcacggctcactgcagccttcaattcctgggcaagcaatcctcccacctcagcctcccaaagtgttgggattacaggcatgagccacgaccacggcctatttcttcatttttcaactttagacattttctcttcactgtagaaagtcatgctttagctaatccatcccccactccaatatcttttacaaagaatcaaattttctatgaccttgcaaatctgaaaatatttttactccgaaattcaaagttgggctaagcatgcaatcttaggttgaaaatcagattcactttgtattttgaatgaacagcttcattagagtctaagtttccactgttcctaatggtaagtctaggactattctgattcctaaattttaaaggtagtatgccacctgccttccctcctattgccccctatcccagacaggaactttctgggagttttactttatcgcagaagttctaaaatttcagtcagtgtggcaatttttacattttttaagctagtctctctcaatggtgtacctttgcaaactgaaggctcctgctctatcagttcaaggaaatgttcctgtctttttgagtttctcttctggccgggcacagtggcacacgcctgtaatccctagcactttgagaggccgaagtgggcacatcacctaaggtccggagttcgagaccagcctggccaacatggtgaaaccccaactctactaaaaatacaaaaatcagctgggcgtggtggtgtgtgcctgtaatctcagctacccaggaggctgaggcaggagaatcactggaacccacgaggtggaggctgtggtgagccgagattgcaccactgcactccagcctgggtgacagagcaagattctgttgcaaaaatgaaaattaaaaaatcctcttcccatttcctctgctttctgttttactagatggatgttggttctgctggactggttctcaaatctatttttctgttttctatctgttttttctactgcttggaagtttcctcaacttcatctttaacacttttactgggttttttatacctatcataatttccaagttttcctgctgtaattcttcctatctgatggcattctgtcctgtccttgtttaatgcacgcaatgctttctcttaactctctaaggatagtaattagctatgggtttgttttttttttaactttctttagatttgtctttgctttttccaacttcctttatttctattatacttataattttgctttttgccctatctttcattagaaacttttcgcaaatgtctgttaaatgctaccccagtgactttgggcttggtcatgctacttgctttggtcaatgaaatgtgagtagacatcaagtataccaccatcacacagaaattttattttttattttattttttatagagacagggtctcactacattgcctaggctggtctcgaactcctgggctcaagcaatcctcctgcctcagcctccaaaaatgctgggattacaggtgtgagtcaccacgcctggccatgcagaagttttaaatgtgtctttgtggtctagctttctccccatccctgagcctctgccctctgccatgcatgatacagagagtggctgctcgctgactactagtcctggaaagacagttgggagccaagtggagccagcagagttggtgatatggctgcatatgatcagcagtcctcatggcccatgtgtaaaaaagaaagaaatctcagtggttataagccactgagatttgtgatcctatctgtgggttaaattatatacataaatttatatatacataggaatatttctagacagattcaccagacaatggaagtagaagaaatcagcgaaagaatctccttccttttcaaattatattcttcaatagcttttaatacatgttcatggcaaagcattttttgttttgttttgttttgttttttgggacggagtctcactctgccacccaggctggagtgcagtggtgcgatctcggctcactgcaagctccacctcccgggttcacgccattctcctgcctcagcctcccgagtagctgggactacaggcacctgccaccattcccagctaattttttgtatttttagtagagacagggtttcaccgtgttagtcaggatggtctcgatctcctgacctcgtgatccgcccgcctcggcctcccaaagtgctgggattacaggcgtgagccactacgcccggcccatttatttttataataattacacataaagggcctccaagagcactgaaataaaagactaaacatctccaatttaaattttttctaaaaataattttatattaattcaatagattctcagtaggaaaattgtgaaaatcagacaaaagatataaataagaataaaaatcaccaattatgtcaacacccagacataattatcattttatttgtgccatttagagacatgattcaccaccttaaatatgtaattttatattcttcttttcaattttacattataataagcactttacagggttaagaattcgcaaacctcacttttaattgctaagtatatttcactatatagatatatcattcctggcttgatcatttccttagtgttgaacaaatatattaattataattttttactaccgtaagtaatatctcagacacttctgggcataaagtattttctgtatttatgacttttccttgggatatattcctattagcagaattgctgggtcaaaggacatgaacatatttaggctcttgatatactgccagaatgctttacaaaaaaattacatggatttatactccccccagcgatatcaaggcagccatatcattgggaatttttaaaatttcagctcacatgagaagcaaaaatttctcattactaggaggctcaatatcttttcacatgtttattagtcatttacattttcttccttttgaattatctgttccttttcatttgttcattcatcaaagtcttagtacttcaccaattgattggtatataatttcttccacatatactaagctcagaaagtctatttctttgtgcttttatacctaacaatagtaacatatcaacgtatctttctttctgtgccctcaataacacaatacctatttgatctctggttgtatatcaaaatcatctgtgaccattcacttcagggatttggattgaattaatagaagatggagctaggtaaaagtattttgttcgtttgttttagacagagtcccactctatcacccaggctggagtgcagtggcatgatctcggttcactgcaacctccacttcctgacttctggcgattttcttgcctcagccttctgagtagctgggattatagggatgagccaccacactgggtaatttttgtattttttggtagagatggggttttgccatgttggccaggctggtccctaactcctggcttcaagtgatcagcccgccttggcctcccaaagcgctaggattgcaggtgtgagccaccacgcctggcctaggtaaaggtatttttaaaaaggtaaaactggaaaacaatacattacattctaggatagaatgatctttagtttttgtcctgtttttcttggcttgtttgtttaaagagaatatagagtgacaggaggtggaaaccctgcttttcgtagcccaacttccgcagaaggaaatgctggtggcccaaaagttgcaacaaacctctttaaaaagctcttaatacagctgggcgcggtggctcctgcctgtaatcctaccactttgggaggccagggcgggcagatcgcttgagatcaggagttcaagaccagcctgaccagcctggccaacatggcgaaaccttgtctctactaaaaatacaaaaaaattagccggtgtggtggtaggcacctgtaatcccagctactcgggaggccgaggcaggagaatcactcgaacctggaaggtggaggttgtagtgagccaagatcatgccactactctccagcctgggcaatagagtaagactccgtctcaaagtaaaaaaaaaaaaaagctcttaatacttaatctgctaataacaacgagggaaaaaatggcatacaataaatttctctggaggaagtcagatgtcactatattcatcacgagattttacaaaagctatgtctcttacctgtttgcagagtactagggaaagacaaggtgactttttcatcttcattctgatagttaaatcctgtagcatgtatttctggaatgagaaaaaaaaatacttcacaattctgactggactgacaagacgaaatcaagactgcaacattttcaagagcaaaatctctacaaaaactaaatattcttaatttggtgaattaagttcctattagcaagagtttcatttcaaatgagcctattctaggttacattaactacattaaatatgctccttaaaaataattacaaattctttaaaattcacaaaacgtcagtgatgtacaggaaagaaggctttataaatgtgatgcttttctatcagattcctgtgtgactatgatattgtgatattgcagtcttactcatgaacatttgagacttggcaacttgccaagatttcagtgttaaagatacatcaaggaaaggtctgttccccaaaggtaagtagcaattcaaactaagatataaatcatacccacttctggtaaaattctttgttgtggccaggcgtggtggctcacgcctgtaatcccagcactttgggaggccgaggcaggcgggtcacctggggtcaggagttcaagaccagcctgaccaacacggagaaaccccgtctctactaaaaatacaaaactagccggctgtggtggtgcatgcctataatctcagctacttgggaggctaaggcaggagaatcgcttgaacccgggaggcagaggttgcagtgagccaagatcgcatcattgcactccagcctaaacaacaacagagaaactctgtctcaaaaaaaaaaaattatttgttgttacatgaaaacaggtatgcaaattgaattaaggctttgacttactctctgccaggaatgagaagagactgcttatttgactgatactttaggatgcttggacatgttagggaaataaccaaagacaccaacttccaactatgtcctatccccattccaaatgaaaagctggccaatcaggccggacatggtggctcacacctataatcccagcattttgggaggacgaggcgtgtggatcacctgaggtcaagagttcgagaacagcctggccaacatggcgaaaccccatttttactaaaaatataaaacttagccaggcatggtggcaaacgcctctaatcccagctatgcgggaggctgaggcatgataatttagaattgcttgaactcaggaggcggaggttgcagtgagccgagattgtgccactgtactccagcctgggcgacagagcgagactctgtctcaaaaaaaagaaaaaaaaaaaaaaagtataaggtaggatgtagagaaactggagcatatattgatagtgggaatgtaaatggtgcagccacttttggaaaacagtttggcaattcctcaaaaggttaaatacagaggtatcatgtgatacagcaatcccattcctaagtatatgtccaagagaaatgaaaacacatgtccacataatgtttgtatacaaatgttcatagtagcattatttataataatcccaaaatgaaaacaactcaaatgtccatcaactgatggaatagataaaatgtggtatatccatacaactgaatgttatttgacagtaaaaagaaatgaaatagctgacacatgctacaacgtaaataaccttgaaaacattatactaagaaaccagccacatatttgtccataacagggcaatctatggaggctgaaagtagattcatagttgcctagggctaggtgatagaggggaaataggcagggtactttctttctggagttcagaaagtgttctaaaattgattgtgatgatggctgtacaactctgtaaatagactaaaaaccgctgaattgtatgctttaaatattaatagatgacatgtatggtatgtgaattatacatcaataaagctattattgaggtggggagaaaggaaagtactacagaaagacaagggaggagaggtggccatgagtacctttatcagtcacaggatgctgtgggtaacaatgattcagattacataacattttacaggcaagatgcccataattcttcctttcttttatgaatcacccaaatataggatttcaaatgtttctgctgtcactatggttcacacatttttataaagccaaaatctctacaaaaccaattaagaaactgtaatttcagattttaaaagaactttaataaatcctctaatcaaatcttcctcattttacagatgaagaaaatgagacatataaagttaatggtttgtcacatgttaactagctagactacaactcagttccctcacttctattgccaaaattatttctacaatcacaagctagctcctaaatttgtttggttttgttttgttttttgagacagggtctcactttgttgcccaggctggagtacagtggcactatctcaactcactgctacctttcccatcaggttcgggagattctcccacctcagcctccggggtagctggggactacaggcgtgaggtgccactaggcccatctaatcttttgtatttttagtagagacaggggtttccccatgttgtccagcctggtctcaaactcctggattcaggcaatctacccacctcagcctcccgaagtgctgggattacagggctgagccaccgtgcctggcccagctcctaaatttgaatagaaatcaaatttgacaagaatcacttcaatgcttaagaatgttcctttctgggctgggcgcagtggctcacgcctgtaatcccagcactttgggaggccgaggtgggtggaccatgcgtggtggtgcatgcctgttatctcagctacttgggaggctgaggcaggagaatcacttgaacctgggaacggaggttgcagtgagccaagatgtgccactgcactacagcctggagacagagtgagactctgtatcaaaaaaaaaaaaacaaaaaacctacagctgttgaataaaaaggtaaacaacccaatttaaaaatggcaagacttaaacttcacaaaggaaaatttataaatggcaaaaaaaaaaaaaagcacataaaaaagtgttcagcatcattagccattaaggaaaggcaaattaaaatcacaatgacatatcactacacatccattagactaggctattaaatgactgacaataaaaatgttgcccagggccaggcatggtggctcttgcctggaatcccagcactttgggaggccaaggcaggaggatcacctgaacccaggagttcaaaaccaacctgggcaacacaggaaaaataaaaaaaaaattagtcatacgtggtgacacaaacctgtggtcccagctactccaaaggctgaggcaagagcattgctgaagcctaggaggttgaagctggagtgagccatgaacatgccactgcactcccatctaggtgacagagtgagaccctgtctcgaaaaagaaaaaaaaatgtgcagggtgtagcacaataactagaagtcatgctggtggtgcctcttttactattcagactgtaagcattttccaaccccagggtttctgcatctgcttgcaaagtctccagatatctaaacactttatgtcattcaggcctctgctcaaatcactttttttttttttttttgagacagggtctcactctgttgcccaacctggagtacagtgctgccatcttggctcactgcaaccttgacctctcaggttcaagtgttcctcccacctcagcctcccaaatagctgggactacaggcgcccaccatcacacccgactaatttttgtattttttatagacatggggtttcaccatgttgcccaggctggcctcaaactcccgagctcaagcgatcctcctgcctcagcctcccaaagtgcagggattacaggcatgaaccaccacacgaagcctcgaatcatctttttttttttttgagatggagtcttgctctgtcgcccaggctggcatgcagtggcatgatcttggctcactgcaacctccgcctcccgggttcaagcacttctgcctcagcctcccgagtagctgggactacaggcacgcaccaccacgcctggctaatttttgtatcgcctggctaatttttgtatttttagtagagacggagtttcagcacgttggccaggatggtctcagtctcttgacctcatgatccacccgcctcggcctcccaaagtgttgggattacaggtgtaagccaccacgcccagcctcaaatcacttctttaaagatctgttctatcaacttgaagaacaatcctcattctataccctcttgtgattttacagcacttatcactactttacatcacatatttgcttgttgcctgtcttctcaaatatcagaaatgttgatgcttgattttgttcacagctctacttccaatgctagcagtttctggcacatagtgtgtgttcagtaagtatctgtagaatgaatgaatcacttcaaaagcaacagactaagtaattatgtcatggagatcattaatgctactcatatgaaatatattaatgaaaaatcacatttactaatgttatgtgaatagagacatggctagggataaaatttccagtcacaacataatatactgattcaaataaggatctatctcaaacctcttagaagataatatttgctctggaactgttagattgtttaaagggtagaaacccataaatactgaagatgcatatgagaagtctgaggaggcttcactggagaaaaaagtatttctaaattaatgtttacattaatactaatatataattagtatatttatatattatagtaatatataatactgatatgataaatgaataattcattcactaatacagtttgcaatatattcataattggaaatgtatatatatgtaaattaagcattgtacatagacacttcactatatatcgtgtatcaatacaacttaaacttgatcgaaaacttttaaaaatggagtatgagagaatcttataaggtatatatgattattcaattctctaagcctccgtttccacacctataaaattaaaatcatatcattacctaattctttctttttaaaattgagataagggtctcactatgttgttcaggctggtctcaaactcccgggctcaagcactggcaatcctcccacctcagcctcctgagtagctgagattataggagtataccattgtgcctggcacctgcttcttaattaaagattgggggccaggcacggtggctcacacctgtaatcccagcactttgggagaccgaggtgggaggatcacttgaggtcaggagtttgagtccagcctggccaacatggtaaaactaaacatacaaaaattagcagggcatggtggcgtgcgcctgtaatcccaactacttgggaggctgaggcaggagaatcgcttgaacctgggaggtagaggctgcagtgagctgagatcgcaccactgcactcagtctgggcaacagagtgagactccatctcaaagaaaaaaaaaattatataatatactcttatataaaacacacagcacagttcctagttattgttaagaaacacttttcagggccgggagcagtggctcacgcctgtaataccagcacttctggaggccaaggagggcggatcacgaggtcaagagatcgagaccatcctggccaacatggtgaaaccccgtctctactaaaaatacaaaaaattagctgggtgtggtggcacgtgcctgtagtcccagctacccaggaggctgaggcaggaaaatggcgtgaactcgggaggcggagcttgcagtgagccgagatcgtgccactgcactccagcatgggcaacagagcaagactccatctcaaaaaaaaaaaagaatcacttttctagatcataacacaccttacagttctttattgatccaactgcaattggtccattatatacatatatataacagcttttgctgaaactccttattaggccttttaaatataattagcattttaaaatctataaacatatatatttgggtataagcatctatgtgtaagtgtgttagtcatctattaaatagaagtaaaatttgattataaacatagcatgtataaaaccatgaccaggctgggcatggtggctcatgcctgtaatcccaggactttgggaggtcaagatgggcagatcacctgaggtcaggagtctgagaccagcctgtccaacatggtgaaactccattactactaaacatacaaaaattagccaggcgtggtggtgcacgcctgtaatcccagctactcgggaggctgaggcaggagaatcgcttgaaacggggaggtggaggttgcagtgagctgagatcacgccactgcactccagcctggctgagagagcgagactccgtctcaaaaaaaaaaaaaaaaaaacaaacaacaaaaaaaaccatggcattataaaatgaccataagcaaaatcaaaagagaagtatatattggggaaaaaatgctccaactcatgatggaaggttaatttcactcaaatataaagaccacgttttaaaaaatcaataacaagaataagaataacactgaaatttaaaatggacaaatatgaataaattacagaaaaaggaaacacaaatggtttttaaaatataatgaagagattctttttttttttacaattaactaaactttttttaaaattaactaaagttggtatttcactaggacgatttagcagatgaaatgggttttaagtttagaacaccatttcttcttccttattacatttccctttttaatgttagccctctacaaacacacacgtatatacacacacacacacacacacactctgcatcaaaaaagccttcctacattaatacttgagcatgataaccttacaatgaaaggtaaatcattagttgaatcatgaaacattttcttccccttgtggagaaaaatcaaattgcttttcctctgctcttacaccacaatcatcaacacagtagacttctgtgaccaaatgtgtggggatttctccccaccaacaagaagcaatcagttctgcagaagataccaccagctgagcaccttctaatccaattcaattctcatgctatctacctggagatagcattagatcccacaggctgagagagggctcagtctcacaagactgcccccacttcagacactagttgtaaggccaggcctcatccagaacttctggccaaccagcttcaagtcagtgttcccatgacccccttcttaggtttgattaatttgctaaagctgtgcccagaactcaggaaaacacgtgtactggtttattataaagaatagcacaaagaatgcagatgaagaggtgcacagaacaaggcatgtgggaaggggtgcagagctctcataccctccctgggtgcaccaccctccaggaccctccacgtgttcagctatctggaagctctctgtacccggtccaggacttcactggaccgtcacgactgaagcatggacaaccgggtagaaatatgattggacaaagtaggacctaatgctaacagactgagtggggaaacctagcaaggcctctctgttcagagtcttcttggcctctctgtgcaacttctttcctcccaagtacagggcaggatgccttctgaaatgggggtcttatgacctccaatcagacaaggtaggtcagataatttctttgctgtcagctccaagacagaatgttgggggatgatcagagtatatttttagtttctattgcctgcttggggagaaaaaggagcaggtaaaagcaaggcaagaaaaggtcagagagcgattctgttttctgaagcctgcttctgaggtttaaagtgccccaacgttattacaaaagaccatctttcacttttattgatctgaagctgtactgaagccacttcaaaaaccaagaataaaaggccaaatatttcaataaaatatatgtatattgttttagtcacttaggaaataacagggactatgggtgttctatgacagaaactgtggatgaaaaccaacatatgtatcataatatcatagcaccctccccaaccttttttttttttttttttttttttgtttgagacagggtctcactgcattgcgtaggcttgtcttgaactcctgggctcaagcaatccttgtgccttggcctcccaaaatgctgggattgcaggcatgagccactgtgccaggccccctttatgtctatacataataaaacttaatcacataaaaggaggtatagggaaaatgagaagtacaagatggtatttcaagaggcaacattaaaaaaagattgaaattttttaaaatagctgaaatcattattgcttataccatctatacaagcatctagtggattctgcctaggcattacattgagatacagaaataaaatcttctaaaatttcaatatcagaagtgccaagtcaactgtacttcaaattttcctttacaaattatctatttgaaactcagaatgtattttcctccaagccactgctatacttaaacaagtaatctaaaccacataattctatatagcccacatataccagtgtagctcagtactagatcaaacacattgtgaggttttattttgtttttttattcagatagcaacttccctatcatattgtttatgtggttttagaaagcagttcaggtgcaaaaaaataaagttcacagttcaaagaaggcctacagtgactacctgctacttggaacatactttgtttctccacaaagctgaaaataatgttgcaatgggaaagaaaacacatcattctggaggatatccaagggggattcaagtgaaaaatggaaccaagaacttactttgcaaagcttcaaggtgacctccttctcaccgtagggcataaaagccaatcagatatatgcatagttacagttcaagcagtacctatactgacaggtcccatattttcaaatggatttcacatttatataacatagtgatggttctatcctattaggctatctaaaaagtctaaaaagaatgagcatgtgccaaatataaatctggttcaacagaatcaaaaaattccttctagggtgcccctgctcttaataaatgactgtgaactatttcattaaaatcactcaggattctggaccaggatttccattgattatgtggtcttacacggttacttaatttgtctaggtctcagtttatcttttttttttttaaaggagtttatatttgggtaatagaggagtatataattcaaactaattatctctctcctacttgacacccacaaaactaaaaaagctggaaggaagggaaaacttctccttaaaagaatcatagaacaagataaggtgatcaagatgaagaagaggatgaaattccataaagaggaagctttgcattctaggccacttttgctctggggtcatttgctgatctagcagagatgtagcagatttggaagctgaggctataggccccagggacaaaagtggaaatccagggcccatcaacactgggggctttgtggctgggtgggcactgtgtctgtaatcccagcattttgggaggcgaggtggaaggactgcttaagcccaggagtttaagtaacatagtctatctaggtagcacagtgagactctatctctattagaagagacaagacaagacaagacaagaagcttgagtaaatgaccccctcctttgggcttgaaaccaaaaaagtgatatcctaccaggaaagatgaacaagaagaaaagcagtccacaagtggaatgtgattaaacttctgaacatctgaagcccagacactggaaaaagatgaaccttaagtattagtaaccaacggggaacaaaacaaagctcccctagatactagcaaactattcatatacctgcttactatgttcaaaaatataaaatcccaatcctgaaaaatttggcaagtaacgcgaagttactttaaaaaaacaaacaaacaaacaaaacccccaaaaaaacccaaaaccaagcaaaacaaagaaaacaagcaaatctggaaaaattaattctagaacaaaaatatgtaataagaaaaaacaggccaggcacggtgtctcatgcctgtaatcccaacactttgggaggctgaggtgagagaatcccttgaagccaggagttcgagaccagcctaggcaacaaagcaagaccccatctctactaaaaaaaattagccaggcaccttggtagcgtatatctgtagttccagctactcaggaggctgaggtgggaagatcacttgagttcaggagtttgaggttgcagtaagctgcgattctgtcactgcactctggcctgggtgacagagcaagaccctgtcttttttttttttccctcttttttgagatggagtctcgctctgttgtccaggctggaatgcaatggcgcaatctcggttcactgcaacctccgtccgcctcccgggttcaagcaattctcctgcctcagcctctcaggtaggggggactacaggcatgcgccaccacgcccggctaattttttgtatttttagtagagacagggtttcaccatgttagccaggatggtctcgatctcctgaccttgtgatccacccacctcggcctcccaaagtgctgggattacaagcgtcagccaccacacccaaccgcaagaccctatcttaacaaaaaaagaggccgggcatggtggctcacgcctagaataccagcacttcgggaggccaaagcaggcagatcacctgaggacaggagttcaagaccagcttggccaacatggtgaaaccccgtctctacaaaaacacaaaaattagccaggcgtggtggcaggcgcatgtaatcccagctacttgggaggctgaaacaggagaatcgcttgaacccaggaggcaaagactgcagtgaaccgagatctagccactgcactccagcatgggtgacagagcgagactccgtctcaaaaaaaaaagtggggggtgggccaggtgtggtggctcatgcctgtaatcccagcactttggaggctgaggcatgtggatcacttgaggtcaggagctcaagaccagcctggccaacgtggtgaaaccccatctctactaaaaatagaaaaaattagccaggaatggtggcacaagcctgtaatcccagctatttgggaggctgaggcaggagaactgcttgaacctgggaggcagaggttgcagtgagccgagatcacaccactacaccccagcctgggcagcagagcgagactccatctctaaataaataaataaaaattaattaattaatacaaataaaaacccacaaaaatgagccaggtgtggtggcgtacacctgaagtcccagctactcgggaggctgaggcacaagaattgctttaagccgggaggtggaggtagcagtaagttgagatagagccactgtaccccagcctgggtgacagagactctgtacaaaaaaaaaataacacggaatcaaatcataattgcctggggaaggagcaaggaaaaggggagaaaaggattataaaggggcatgaggaaatgttctagggtgatgaatatgctcattacctggttacattcatgagaaaacttatcaaattacatattttaagatgtaccctttatagtatgtcaacattacaggtactctcacaaagctatcaacaaaaataggaaagaagcagcagcaagcaacaacagccataactactgcctggagaatttcccccaaaacaaacaaaccaaaaaaagtgtgggctgcagctaaaagcagtacatttttaggattaaaatttatatttaaatgaatataatagaaagaaggactgaaaagtaataagccaaacatccatctcaagacttctgtttgttttttgtttttttttaagggcagtcaagtgaagcagtgggagtgaaggaggaataaagaaatctgtaactggctatgattgatgagttataaacaccactgcactgggaccagcctaaagaagtttttttaaatctgcaaagtagaccgggcacggtagcggtggctcacacctgtaatcccagcactttgggaggccaaggcgaaccgatcacttgaggtcaggagtttgagaccagcctgaccaacatggtaaaactccgcctctactaaaaatacaaaaattagctgggtgtggtggcacatgcctttaatcctagctatcaggaggctgaggcataagaatcacttgaaaccagaaggcagggattgcagtgagccaagatcacgccactgcactccagcctgcgtgacagagtaagactccgtctcaaaaataaaaaaaaaaaaccttgcaaagtaaacccaaaggaagcagaagttaataaggaaataatagttaactgaggtctacaaagcaatggttagttctttgagaaaaaaagcaagaaaactgaaaaagatctgggatcaagaaaaaagtaaaacaggctgggtgcggtggctcatgcctgtaatcccagcactttgggagaccacggcaggtggatcacaaggtcaggagttcgagaccagcctggccaacatgggaaaccccatctctactaaaaatacaaaaattagccgggcgtggtggcctgcgtctgtagtcccagctacttgggaggcagaggcaagagaactgcttgaacccgggaggcagaggttgtagtgagccgaggtcacgccagcacaagactccatttcaaaaaaaaaaaaaaagtaaaacagaaggcacaaataaataaaatgagccctgactactacctaacttcccttctaattctattaacttgaaactatagcagagcttccctaactgtggcagatccaaacatgtattacaggtttatcaagataataattcccttggcccttggaccagcctggtaggcctagagcaatgaaagatctctgataccctccagttgtgagcctcctcttccttatgtaccaggaaaacatcagtttctactaatgccttgaaaaaaagtaaggaagcattgatgtggagaacaactaactcttccagcttcacacttaagaacagcatacatggccgggcgcggcggcttgtgcctgtaatcccagcactgcgggaggctgaggcaggcggatcacctgtggtcggaggttcgagaccagcctgaccaacatggataaactccatctctactaaaaatacaaaattagccggctgtggtggtgcatgcctgtaatcccagctactcaggaggctgaggcaggagaatcacttgaacccgggaggctgaggttacggcgagccgaaatcatgccattgcactccagcctgggcaataagagcgaaactccatctcaaaaaaaaaaaaaaaagaacagcatacactacaatgttactaacattatgcaatcagtgttttctctacatttaatgcaaaaactacataatttacagcagttttttatgctctccattttcttaatatttaaaatactgtaaagaatctttacaattagtaagtatcttgatggtagtcctcaaagggaagtaaaatacaagttaaagctggtaacaaaataatctcaaatacgaaataattttgttacccataaagttactaggatagagcacatgaagaaatgcagacctgacaagtcccccttatctgcagtttcactttccacagtttcaattgcctagagtcaactacagtctgaaaatattaaatggaaaattccagaaacaaacaattcataagttttaaactgtactgttctgaatagtgtgatgaaatcttgtgccctcccattccattctgcccagaacatgaatcatccctttctccgacctatccatgctgtatatatatgccacccagcccattagtcacatagtagccatctcagttatcagattgactgtcaatgtatcacaaggcttgtgtttaagtaacctttattgtacttaataatggcctcaaagcacaagagtagtgatgctagcagtttggaaatgtcaaagaagaagagtgagtataatacaataagatactataagagaggctgggcacagtggctcatgcctgtaatcctggcactttgggaggctgaggcaggaggatcgcttgaagccaggagttcaagaccaacttcagcaataaagccagacctgactcacaaaaaatttttacaaatttgctgggtgtgttggtgcatacctatagtcctagctaactgggaggctgaagcaggaggatcacttgagcccagcagtttgaggctgcagtgagatatgatggcaccactgcactccaacctgggcaacagagactctgcctctaaaaataaataaatgaaataattttttttaaaaagaagatattggctgggcgcggtggctcatgcctgtaatcccaacactttacgaggctgaggggggaagatcacctgaggtcaggagtttgagaccaggctgaccaacatggagaaaccctgtccctactaaaaatacaaaattagccaggcgtggtggcgcatgcctgtaatcccagctacttgggaggctgaggcaggagacttgcttaaacccgggaggcagtggttgcagtgagccgagatcacaccatcgcactccagcctgggcaacaagagtgaaactgcatctcaaaaaaaaaaaaagatattgtggctcacacctgtaatcccagcactttgggaggccgaggcgggcagatcacgaggtcagaagatggagaccattctggctaacacggtgaaaccccgtctctactaaaaacacaaaaaattagccgggtgtggtggcatgcgcctgtagtcccagctactcaggaggctgaggcaggagaatcgcttgaacctgggaggcagagattgcagtgagctgagatcgcaccattgcactccagcctgggcgacagagcaaagtctcaaaaaaaagaaaagagagagagatgcacacaacattcatgtaacttttattacagtatattgttataatggttctattttttattagcttttgttaatttcttactatttctaatgtaaaaattaaactttatcatagtacatatgtatagggaaaaacatagcatatataagttttgctactatctgtggtttcaggcgtaccattgggggtcttagaacacatctgccatagataaggaggaactactgtatgacagacttactccatttatctagattttcttcgtttcattcaatgtatatttattaaatccctactatatgtcagataccagggaaaaccacaaatgaaaaagaatgaatcataattactggatctttttttttttttttttgagtagaagtctcttgtcccccaggctggagtgcaatggcgtgatcttggctcactgcaacctctgcctcccaggttcaagcaattctcccacctcagcctcccgagtagctaggattacaggcgcctaccaccacacccagctaatttttgtacttttttttttagtagagacgaggtttcaccatgttggccaggctggtcttgaactcctgaccctaggtgagccgcccgcctcggcctcccgaagtgctgggattacagccatgagctaccatgcccggcccctcaaggatcttaagattccattgaaaagtagtacagacatgacacaaacaaataattgcaatatggtgtggttacattaatgacaagcaatagagtggcaagtacatggaccctagatccaaaccgcctgggtttgaatcctggctctaacatttatcagttttattacctaaagtagataccctctctgtgcctacggttgttctctatatgaacaggtaatgcacttagtgcctggtatagagtaaacactaaactcatcattatttttataattatcactattaaacattatattatgaaaaatgtttcacttggttaggcacctaacctgaactggaggttaaaaagaagataaaacgttccctctatagtcagcaataagccaactaaattcctaaaacagcagtcactaaagcaatccatatcaccttaaggctatttaaataacgttttaaaacttaccaagtataactaagacaaaatttaaaactattctacgctcatatactttgtatatagccatatggaaacctacacaggttctttatcagacagcccctcaatattattcaaaaccaacaaatgtaaaaatgaaagaatgcaaatacactgcaaacttcatgttctttatctctgatttgcactaaaaaggaataaaggggctggctaactatcacttgctccttctaatgctgacatttatttggctccagtttgaactaatgatacttaagggttgtttatttgagaatggatctatcctgcatagaaaccagaatatacttcacagataagcatagaaatccaaacaagggccaggcacagtggctcatatctgtaatcccagcactttgggaagctgaggtaggaggactgcttgagtcttggagtctgagaccagcctggggaacattgcaaaaccccatctctacaaaaattaaaaaattagccaggtgtggtggcacatgcctgccatcccagctctccgggaggctgtggtgggagagtaacttgagcccaggaggctgcagtaagccatgactgtgccactgcattccagcctggatgacagagaaagacctgtctcaaaaaaaaaaaaaaaaaaaagaaatcccaacaaacaagatcagaaattagaaacttaagacttttgtcttaatgttaacactatataaactcttcctctttgaaaaatatgccctctgtttgtcactattgtcttggcaattcgttatactttctcacaagcaaagaaacctatttcagacttgcgttcacacttatcaaactatcacttaaacagagtatttaaggtctggtgcagtggttcacacctgtaatcccagcactttgggaggccaaggtgggcgtcaacagtttgagagcagcctggccaaaatggggaaaccccatctctacaaaaatttaaaaattagccaggtttggtggcacacacctgtaatcccagcgacttgggaggctgaggcacaagaatcgcttcaacccaggagacggaggctgtagtgagccgagatagtgccactgcactccagcctgggcaataagagtgagactctatctcaaataataataataatatttaataaaaactctttgaatgacacaaattaccacttaggcaaaaagaaccttggtatttacaggggtaaaaagttcaaataaataataaacttcatttattattatatataagccaagggaatttattatatgcaagggaatcactgttcagacaatgagctgaggggccagaatttgtgagacagaaggggtccttttcacacaatatttacttgaagtttcacaataatcaaaggtatctgcttttagcccagttattcatgtatacacatcaacaagatttaaattaaccaaaatgttaaatgtttattaagctgccaccatataatgtaggttttggaactagtatttaaatggaagagtatatcttcagagtaaagttccattgagaaatagaaaagtctgtaaaaccaggtctcgtcttataacaagaaactgatactgacttctgtaacaaagctaaatagtctcttgatgtgtagttggcacaattccagaaatctaaactactagcaaatttgcttatatctggtataactgggccgggcgtggtggctcatgcctgtaatcccagcactttgggaggccgaggtaggtggatcacctgaggtctcgagttcgagaccaggctggccaacatggtgaaaccctgtctctactaaaaatacaaaaattagctgggcgtggtggtgcacacctgtgatcccagctactcgggaggctgaggcaggagaattgcttgaacctgggaggcagaggttgcagtgagcaagatcatgccattgcactccagcctgggcaacaagagtgaaactctgtctcaaaaaaaaaaaacaaaaaaacatatatatatatatatctggtataactgttactatatctaaagaaagggatgagaaacaaacctttaatttctacttgaaatgatttttcatttttgcaaagagaaaagggtacataactaatatccaaacagagttaataaaagcctattaaggattattttaaaacaagttctttaaaaaaaaaaaaaaaaagttctactagttgcagtgagccgatactgcgccactgtactccagcctgggcaatacagcaagactccatctcaaaaaaaaaaaaaaaaaaaaaacagacacatgctcataggtcttttaggatgactgcacatatcacaaaaaaatggcctttttcttcaaataaaaacttacacaaagaagcaacaattggccaggcacggtggctcacacctttaatcccagcactttgggaggccgaggcgggcggatcacaaggtcaggagatcgagaccatcctggctaatacggtaaaatcccgtctctactaaaaatacaaaaattagctgggcgtggcggcgtgcgcctgtagccccagctgctggggaggctgaggcaggagaatggcgtgaacccgggaggcagagcttgcagtgagccgagactgcgccactgcactccagcctgggcgacagagtgaagactccatctcaaaaagaaaaaaaaaaaaattaaaagaagcaacaatttcatgccttaaaagtaattttctgattttacttttatcttctttttttattacatatatatatacacacacacacacacacacacacacacacacacacacacacatacatacatgtggaagcccaaatctatccctgttcccaatccaaactattttttttttttttgagacagagtcttgctctgtcgcccaggctggcgtgcagtggcacaatctccgctcactgcaacttccacctcccgggttcaggcgattctcctgccttcagcatcccaagtagctggaattacaggtgcctgccaccacgcccagctaatttttgtgtttttagtagagacggtgtttcaccatgttggccaggctgttctcaaactcctgaccacaggtgatccgcccacctagccctcccaaaatgctaggattataggtgtgagccaccacacctggctgcccccaattcaaactttaacaactcatacaacttcccattctcttaaactctaaaattacatgggcttacacatgacttcaggttttttcctgttgctgtggtagaaaagtgttgagaaatgtaccttagctagttctgaaggaaaatattttttttttgagacagagtctctgtcacccaggctggcgtgcagtggcacgatcctggctcactgcaacctctgcctcctgggttcaagcaattctctgcctcagcctcctgagtagctgggattacaggcacccgccaccacacccagctaatttttttatttttagtagagatggggtttcaccatcttcgccaggctggtcttgaacttctgacgtcatgatccacccaccacagcctcccaaagtactgggattacaggcgtgagccactgcacccagcactgaatatatattatgtatctaaaataatttaatgttttatcagaatctctcttcaaatcttcttttccattaagttttcatttctctcctgactctcttaataagaacactaactgggcttccgtgagatacagatcattatgagcttagcaacattcggttacacatattcaaaacttttcagtcaggtcgggcgcggtggctcacgcctgtaatcccaacactttgggaggctgaggcgggtggatcacgaggccaggagttcaagaccagcctaacaaacatggtgaaaccccatctctactaaaaatacaaaaattagccgggtgtggtggcacacgcctgtaatcccagctactcaggaggctgaggcagaagaattgcttgaaccccagaggtggaggttgcagcaagctgagatcgttgggcgacagagctagactccatctcaaaaaaaaaaaaaaagaacttttcagtcacctgaattctatcccgacatttttagtacaggaagataaaaaacaaacttgagctgaaaccatgccagctggaaggtacacatttatattactagatctacctatctacataccactttaaaaccacacatcgaatttaaacattctctacctgcaacaaagaaagccttgttgctttgatatacctggctaaagtacttctatttttctccacagttaaagaaattaaataatcactctttcatttaccagacaattttttaaaagtggcactcattcaagtccatttgaagaatctgttcttccagcagtttgatctaatttacaatcaattgaacttaagtacttcttcggaacagtatgttcaactgctactactttgactttctatagacaaaatagtttaagaaaaaatcataaatgttatgaggccttaaaatgaaacttcttttcagtataatgtaaaggagagaggaaatcaaaatataaaatgtaagttaaaagatcaaatgtgtaaattattttattttatttatttttttatttttttttttgagacggagtctcgctctgtcgcccaggctggagtgcggtggcgcgatctcggctcactgcaagctccgcctcccgggttcacgccattctcctgcctcaacctcccgagtagctgggaccacaggcgcccgccaccacgccaggctaattttttgtatttttagtagagacagggtttcgccgagttagccaggatggtctctatctcctgaccttgtgatccgcccacctgggcctcccaaagtgctgggattacaggcgtgagccactgcgcccggccttaaattattttttattaaagaagtctcagagtaaccaataaccattttgacaaggaatgtctaggtgaaatcaaaagtaaaaaggcaaccaggtgtggtggctcttgcctgtaatcccagcaacctgcgaggccgaagaggtcggatcccttgagcccaggagttcaagaccagcctgggcaatataggaagaccccccccatatctataaaaaaatacaaatacgaatattagccaggcatggtggtacacgcctgtaatatcagctacttgggagggtgaggtgggaggatggcttgagaccaggagacagaggttgtggtagttgagatcatgccactgccccccagcctgggtgacagagcgagactctctcaaaaaaaaaaaagtaaaaagcaatccagctccaatactgatgtacttgtaagagtttatgccaaacttggtatctatttaaaaatcagctcatacgggaataagatttccagtcaaaacggactactttcatactaaaattataaggtctaaaacagttctcggccgggcgcggtggctcacgcctgtaatcccagcactttgggaggccgaagcgggtggatcacgaggtcaggagatcaagaccatcctggctaacacggtgaaaccccgtctctactaaaaatacaaaaaaattagccaggcgtggtggcgggagcctgtagtcccagctactccggagggtgacgcaggagaatggcgtgaacccgggaggcggagcttgcagtgagccgagatcgcgccactgcactccaggctgggggacagagcgagaccccgtctcaaaaaaaaataaaaaataaaataaaataaaataaaataaaacagttctcattttatagacactaatcgagttccacattctataccatgtttctttttagcatgttcttcccctgtaactaactccattatttagcttctaatcttcatattgtctcataaagcaaatgtttttctctgaattaggagtatgacttatctcaattttaaactatagtacaaaaagaaaaaaaaactttaagaaaaacataaaaacgaagcctctttgaggagcctttcatgttcaaagtacttaatttttcaaataactcatcagctttattatgcgtattatattcattttatacttatgaaaatatgatttccctagtaccacaaaataagttaatcttggaagtggaattttaattgtgacatttgcccgggtgtggtggctcacatctgtaatcccagcactttgggaggcatgcagatcacctgagatcaggagttcaagaccagcctggccaacatagcaaaaccctgtctctactaaaaatacaaaaattagctaggtatgatggtggacacctgtaatctcagccactcaggaggctgaggcagggagaactgcttgaactcacgaggcagagatagcagtgagcttagatgatgccactgcactccagcctgggcatcagagcaagactctgtctcaaaaaaaataaaaataaaaataaatttaaaagtaaaataaattgtgacatttatttcacaatactgttaggttataatattcaatatttcccataaacattttaccctttttctttttctttttttgagtcagggtctcactctgtcgcacaggctggagtgcagcggcgcagtcatggctcactgcagcctcggccacctgggctcaatagatcctcccacctcagcctcccaaatagctgggactacaggcacgcaccactatgcctagctaatatttttgtttgtttgtttgtttttgtttcgccatgtggcccaggctggtctcaaactcatgggctcagggatctgctcgcctcagcctcccaaagtgctgggattataggcgtgagccacttcacccagctgaatttacccatttctaaagtaacaaacactgaagtcttaacctgaaaatgtctctctctctctctctcacacacacacacacacacaccccccccacatatgcacatgcagacagcaaattaaaatggaaaacagctcttaccttcatctccttctggtgcatatgaagctgtaataatatcaatatcagcacaattcatcacaatctgattagtcgcctgcctcacctaaggggaaaaggaaaatcaacagtgtcagaaatagcctagattaatagtatatacaacttggccaggtgtgttggcacacacctgtaatcccagcactttgggaggctaagcaaagaggatcgcttgagcccaggagtttgagaccagcctggaaaacatggcgaaaccctatctctacaaaaaatacaaaaattggccaggagttgtgatgtgtgcctatagtcccagctactcgggaggttgaagtgggaggactgcttgagcccaggaggttgaggctgcaataaactgtgattgtgcagctgcactccatcctgggcaactgagcaagactctgtgtctctcaaataataataataatgatgttcgtaagacttgaactaatatcacagtcaattttttaaaatccagacttcgctaaaacctagactgagaatttatgcatcaatggtacaaataaatgaagttttaataatccaaagcaactcatattttccaaattatattaaaaacaataatggatgtttaagtatttcacatcacttacatctaaccaatgagccaaataaaataatgttttctacttaaactttgattttaaactattaaagggctgggcacagtggctcatgcctgtaatcccaacactttgggaggctgaggcaggaggattacttgaggtcaaaaattcaagaccagcttgggcaacacagtgagacaaaaaaaaattttaaattaggagggtgctggtacccacctatagtcctaactacaggagaggctgaaggaggaggatcccttaagcccaggaggtcaagcaaggctgcagtgagctatgattacatcactgacctccggcctgaacaacagagtgagactctgtctcaaaaaataaaaataggctgggggcatcggctcacacctgtaatcttggcaccttgggaggccgaggcaggcggatcacttgaggtcaggagtttgagatcagcctggccaacatggtgtaaccccatctctactaaaaattagccaggtctggtggcacacacctgtaatcccagctactcacgatgcaggggcaggagaatcacttgaacccaggaggtgagcttgcaatgggccgagatcgcaccattgcactgcagcctgggcgacagagtgagcctacgtctcaaaaaaaaaaaaaagaatacaaaaatcagccaggcaaggtggcataggcctgtaattccagctactcagggggctgaggcacgacaattgcttaaacccgggaggcagagattgcagtgggctgaaatcctgccactacactccagcctggtaacagagtgaaactctatctcaaaataaataaataaatacgtttaatttcataaaaatcttaattaggaaacatttcttacaacatattgcaataattatatattttaacctgcacatcaaactcaccatgaggccttctgtgaggatagaggaagaaggctgatactataaattatgtcaaaactttatacaataactcttaccaccgagtgtggtggctcacacctgtaatcctagcacttttggagggtcaggcaggcagatcacttgaggccaggaattcaagaccagcctggctgacatagagagtagagagaccccatctccactaaaaatacaaaaattaaggccgggcacggtggctcacgcctgtaatcccagcactttgggaggccgaggcaggcggatcatgaggtcaggagatcgagaccatcctggctaacatggtgaaaccccgtctctgctaaaaatacaaaaaattagccgggcatggtggcaggtgcctgtagtcccagctactcgggaggctgaggcaggagaatgatgtgaacctgggagacggagcttgcagtgagcggagattgtgccaccgcgctccagcctgagcaacagagcaagactctgtctcaaaaataaataaataaataaataaacaaacaaactagcatcttggtccatgttttcctgtgcacacatgagagaatttttccatggaaaggaacctaatagtggactttctggattgttggacataaatcttcaactttaccaagaactgccaaattatcctctagagtggtgtcaactgacattcccatgagcaaagaatgaagaaatcccactttcagcatgttctgaaaaactttagtatttttgacaatctaatgggtattaaatgatagtcctggccaggcacagtggctcacgcctgtaatcccagcactttgggaggctgaggtgggtggatcacttgaggtcaggagttcaacaccagcctgaccaacatggtgaaaccccatttctactaaaaaaaaaaaaaaaaaaaaaaaaaaaaaaattagccaggcctgtggtgcgtgcctgtaatcccagctacttggaaggctgaagcaggagaatcacttgaacccaggtagtggaggttgcagtgagctagattgagccattgcactccagcctgggcaacaagagcaaaactttgtctcaaaaattaaaaaaaaaaatttttgtactgatagtccattggtttaatcagaatttccctgattactaataacattggttactatgcatcttttctcgtgtgtgtgtgtgtgtgcacgcgccattaagtttttccactgtgaactgcttgtttaacactcttgtgcatttttcttttttttttttttttttgagatggagtctcgctctctcacccaggctggagtgcaatgatgcgatcttggctcactacaacctccatctcctaggttcaagtgattctcctgcctcagcctcctgagtagctgggattacaggtgtgcaacaccacacccatctaatttttgtatttttagtagagatggggtttcaccttgttggtcaggctggtctcaaactcctgacctcgtgattcgcccgtctcagcctcccaaagtgctgagattacagacgtgagccaccacgcctggcctcttgtgcatttttcaatttagtcataaccttgcttaaaacaaaacttcaaattcatttccagacatttgaatgttctaaatctaaaataacaaaaacacagatgccctaaatcacaaagaaatgcttcctgaggcaggtaagtgtagcaagccatgtggaagctgtgcacaaccccttaaaagaaggaggtggtagccatttcttggagccaaagaattatcgctatggtgactggcaggtttagtgctgacagatcttccaatttttttttttttttttgagacggagttttgctcttgttgcccaggctggagtgcaatggcgtgatctcggctcaccgcaacctccgcctcccaggttcaagcgattttcctgcctcagcctccctagtagctgggattacaggcatgtgccaccacgcccggtaaattttgtatttctagtacagacggggtttctccatgttggtcaggctggtctcgaactcccgacctcaggtgatctgaccgcctcggcctcccaaagtgctgggattacaggcatgagccaccgcacctggcctgatcttccaattttttttttaaaagctacaaattcagatttcatgtgcagtctctctattttttattaatggtaactaattcaagttttcagaaacactgtatagaccaaacaaaatctgtgtgcagatcaacaatgctcttagacaactgaacataccacaaaactaggtaagaacatcagagtagtacgctatctgcatgaaagacctgtatacgggtaatcatttattaataaccaatacatatttaaacatgattagctggcaactaaaattacctgcctaaatgagagacagtaaattacaaagtctataatgagctattcaaaatctgtaacacataaagtgaaactactttggcttacaaaaaaaatgcttctcataagtcttcatgtttcaaaacaaagacgtcatttaatgaatggcttatcttttaagcagcaatattccttcacactatttcaccaaaacatacctaaatagcactaaaacctttgtgtccaactggcgatttatagcactaaagttgaacaaaaaaacaaaaagaattctttgcctattcagaagttgacttaaaaattcagaaacatggctgggcacggcagctcatgcctgtaatcccagaactttgggaggccaaggtgggtggatcacgaggtcaggggttcgagaccagcctggctaacatggtgaaaccccatctctactaaaaatacaaagattagctgggcgtggtggcaggcacctgtaatcccagctactcgggaggctgaggcaggagaatcgcttgaacccaggaggtggaggttgcagtgagccgaaatcgcgccattgcactccaacctgggcgacaaaagcaagactccatcttaaaaaaaaaaaaaatcagaaacacaaagaaatgaagcacttactggggtatgctccaatgggtaaaatgaataaaaacctttctgagtttgaagtttatgccagcaaaataataactgtggtttagttactggtcttaatcattacctaggcaaccacactttcatccatcaacatctacagtgaatttcacagtagccaagcagttaatccaccaatgtcaagatacctgtacaacattatacatgccaaatcacacagcacattactactgcaaccatttgagagaaagtatttgtgcattttggaaaggcaccatgcacaacatccaatttcaagtaccttccaactcctcctgtgtttaggggaaactcatctatttatactaatgaattaagctgtttcttgaattgctactaattttttttttccaggatactaccatttctggaagggtgggagggaggaaccaaaggaacaaaggtacttatcttaaaaatagaaatccattcacattttaaaaattggtcagcatcttgtcttatattagagatgcacttatttaaaaagttgaccaataatgggataatctatgtaaagtctctgttttagcacttagtgcctcatatgtagtcatcacttaatagatgttaagacatacatatacacacacacaggttaaattgtgctctcatatcatctaacagcattcacctaacagtttataaagcttctgatcagaatgatatgaagtttaaaaactatgtattgtattatatggcactttggatatcagcatatgtgtactaccccaagaaggtaatttaaaatatctgtctggacataagtgtatgtgctgactacaacgcagtataacactgctctttgtgatgctgctcttccaaacagtagtgctgacctgatggtgtagtacatgatttctcacctttgacaccttcatattagtaaatattagctgtgtgttccactatcaaaaaaacaggtaataattcaaagaaatttcagcattaaaatcttcagtttcccagtttaaaacacaagtgaaacaaggttggcatataaaagtgcactgataacaagctcattttcaatttttctacttgatgttattaaaggatagaatgttagtgtatccttgctttgtttcaaacccaggattaagtcttcttggcctcctatatagactgcacttcaactgagccaaatactaagtaagggctgtaccaaagaggcagcttgacgcctggtaacaactttacaatggaagtttcctatgagctagggaggcagaaatcggagataacattttcctgaatgagtctttactatagtcactcaggaacatatcttacatgtacgatagtaagactcaagagggtttttttctgattgtcaatgtcctgagacttcagtaaaagaaaatctccagtgtgacaattccaaatgccagtctgaagcctgagtcaatttgcctaataaaactgatttcaccattaaaatagcaataattgttgccttggtggaacagttctataatagctaaagacaagaagaagcagataattagtaaactcaagttgagccaagttttctaacaagaaacactgaaaagagccatttgcagaaggtcaaaaataattaccattaatgtaaaaatgcaaaaggcacagaatattggtatgtgatgtttgtggctactaatatgcaattaaagttttaaactatacgtaggaataaaaaggaataatacgcacctacctgaagaaagaagttacttctagaggcagggtgggacgagatggaaacgggctttagtggtatctgtgacattttattcccccccaaaaaaagcatgcacagtctgatgaaaatggggcaaaatgttaacatctgtttaatctcatagtgtgtgactttcttgtatttctaaaatacttcctaatttaaaataaaattttaaagagattacaagtgaccaaataaaccaagaaccacatacttgtatggtgttcaaaacaaaatcactaaaatctagagaactaatctcagttaacaacaaaagccatccgaaggctcagttatttcccactgactcacatacagattagagtaagatttacttcacaacaagagcaggctcatttatgtggcaaagttcggagaagcttcacagataatttactactcaagaccacatttacccaggttgtatcagagtatcagttgtatctagaaccaggaagctaaaaagaaagaaaaaaaaaaaggcctggatgaaaagccaaaataggtgatacaaagtccgtacaataaaacacataccctttactcagaagagaatccaacaaactctcacacagcaattgattttttagcccaaacaagcttgtttatctggctactaaggcttcttcagatgaagttcagtaaaatacaagagggaagaaattgcacaacaggcagcaacaaggcacaataagcagcaagaagaatctgagagtaaggaaaacaaaacaattttaaagaacagacacaggctagccgggtgcggtggctcaggcctgtaatcccagcactttgggaggccgaggcgggtggatcacaaggtcacgagttcgagaccagcctggccaatatggtgaaaccccttctctactaaaaattcaaaaattagcctggcatgatggcaggtgcctgtagtcccagctacttggatgaggcaggagaatcgcttaaacccgggaggcggaggttgcagtgagctgagatcacgccactgcactccggccttggcaacagagcaagactctgtctcaaaaaaaaaaaaaaaaaaaaaagaacagatatggactaggcgcggtgggtcatgcctgtaatcccagcactttgggaggcagaggcgggcggatcacctgaggtcgggtgtttgagaccagcctagctaacatggtgaaacctggtctctacagaaatacaaaaattagccaggtgtggtggcatgcacctgtaatcccagctactagggaggctgaggcaggagaatcccttgaactagggaagtggaggttgcagtgagccgagatcgcaccactgcacactccagcctggcctaggcaacagagtgagactctgtctcaaaaaaaaaaaaaaaaaaaaagaacagatatggcttggcgcggtggctcacacttgtaatcccagcactttggcaggcggaggcaggcagatcacctgatgtcaggagttcaagaccagcctggccaacatggtgaaaccctgtctctactaaaaatacaaaattagccaggcgtggtggtgcatgcctgtaatcccagctactagggaggctgaggcaggagaactgcctgaacccgggaggcagaggttgcagtgagccgagattgtgccactgcactccagcctgggcaacagagcgaaactccgtctcaaaaagaaaaaaaaagaaaaaaaaacagacatgaaactgataaattatagtacatagtttggggtcaataagagatgttcagaataaagttcagtatttaaaaaaaacaatgaaacaaacctacactatgaggaattgcaaagcataaaaagataatgtattttagaaatatttccattcagattagtcaactttttttttttttaagacagggtctcgctgtgtcacccaggctggagtgcaatggcgtgatctcagctcaccgcaacctccgctcctccgcttcctgagttcaagcaattctcctgtctcagcttcccgagtagctgggattacaggcatgtgccaccacgcccggctaattgttgtatttttttgtagagatggggtttcatcatgttgtccaggctggtctcaaacttctgacctcatgatccacccacctcagcctcccaaagtgctgggattacaggcgtgagccaccacacccagcctagtaaacttttttaaaaatgtctaagggcctcaaagggtaaacttcagttatctggaaaaatcactgcagaattcattgccagatgaattagacaaagcttagcatacaaaactattatacttctttcctcatagatacatttcaaaaaacagaaaatctgaacaaattcaattccttatcaccaatattttgaatttaattttatatatatgaattttttttaagaaaatttcttccttttttttttttccctggagacagggtcttgctatgttgcccacactggtatcaaactcctgtgctcaagcaattctcccacctccacctcccaaagtgctaagattacaggagtgagccacagtgtcggccaaaatgattacatagaagatatgcagaaaatggccaggcacggtggctcatgcctgtgatcccggcattttgagaggccaaggcgggtggatcacctgaggtcaggagtttgagaccagcctagccaacatgatgaaaccctctctctactaaaaatacaaaaaattagctgggcttggtggtgcgcgcctgtaatcccagctactctggaggctggggcaagagaaacgcttgagcctgggaggcagaggttgcggtgagccgagatcgcgccattgaactccagcctgggcaacaagagcaaaactccgtctcaaaaaaaaaaaaaagaagccaggcacggtggctcggtggctcacgcccatcatcccagcactttgggaggctgaggcaggtggatcaccggaggtcaggagttcgagaccagcctgaccaacatggagaaaccccgtctctactaaaaacagaaaaaattagctgggcgtggtggcacatgcctgtaatcccagctatttgggaggctaaggcaggagaactgcctgaacctgggggggtggaggctgcagtgagctgagatcatgccactgcactccagcctgggcaacaagagcgaaactccatctcaaaaaaaaaaaaaaaaaaaaaaagagaaaatatgcagaatttgggcaaaaaatttgtaacacagaattgacaataaccattcaggtgccaaatttttaatatgccaaacaaacttctatattggcaactcttcacttagtgccaatttagttatctccaacatgaatattttgttagtagaggccaggggttggctaggatatcctgatttctggccttgaatgataaacttagtttctctggcacaggtaaagtatttccataagagaaagcccagctgggcacggtggctcacgcctgtaatcccaacactgtgggaggccgaggaagatggaatgaggtcaggagatcaagaccatcctggctaatatggtgaaaccccatctccactaaaaatacaaaaaaatcagccaggcatggcggcgcgtgcctgtagtcccagctactcaggaggctgaggcaggagaattgcttgaacccgggaggcagaggctgcagtgagccaagatcgcaccactgcactccagcctgggtgacagagcaagactccatctcaaaaaaaaaaaaaaaaaaaagaatacccaattattgtaccaaccactacacactcataatcataaatagtagtcacacacataaacttataattcattttaattaattatccacaaacggagaggatcaaaatatgaaatatctacaaaagtccactgctctcaagtatccagtgtaaagggaggggacagggaatgaaataaattttgggcctagagaaacttctgtataataacaaattttcaaaaccagctagaccacactaatgtgaaagacaactaatttttttttttttttttttttttttgagacagagtcttgctgtgtcgcccaggctggagtgcagtggcgcaatctcagctcactgcaagctccgcctcccagattcacgccattctcctgcctcaggctcctgagtagctgggactacaggctcccgccaccacgcccagctaattttttgtattttagtagagatggggtttcaccatgttagccaggatggtctcgatctcctgacctcgtgatccgcccgcctcggcctcccagagtgctgggattacaggtgtgagccaccgtgcccggccaagacaactaatttttaaatcactgaacatggactaatttcttcaccttctgcagcagtccacaccccaggccaggttaaaaatccactaagttggccgggcatggtggctcatgcctataatcccagccctttgggaggccaagggaaggggatcacctgaggtcaggagttcgagaccagcctggccaacatggcaaaaccccatctctactaaaaatacaaaaattagttgggcgtgatggcacacacctgtagtcccagctacccaggaggctgaggcaaggagactcacttgaacccggcagggggacagggtggaggctgcagtgagtcgagatcacaccacttcactccaacctgggagaaagagcgaaactccgtctcaaaaaaataaaaataaaaaataaaataaatccactaagtttctaatatgtaacctgtacaaatactctgggcttatcgtaaaattttgtaactaaagcaactaagcaacttgcatattttgtgttatgtgattccaactgttaggaaactgatccaatatcagtcataaatataggtttctacagataagaattttgtccccctgcccggccagccgccccgtccgggaggtgaggggcgcctctgcccggccacccctactgggaagtgaggagcccctctgcccggccaccaccccgtctgggaggtgtgcccaacagctcattgagaacgggccaggatgacaatggcggctttgtggaatagaaaggcgggaaaggtggggaaaagattgagaaatcggatggttgctgtgtctgtgtagaaagtagaagacatgggagacttttcattttgttctgcactaagaaaaattcctctgccttgggatcctgttgatctgtgaccttacccccaaccctgtgctctctgaaacatgtgctgtgtccactcagggttaaatggattaagggcggtgcaagatgtgctttgttaaacagatgcttgaaggcagcatgctcgttaagagtcatcaccaatccctaatctcaagtaatcagggacacaaacactgcggaaggccgcagggtcctctgcctaggaaaaccagagacctttgttcacttgtttatctgctgaccttccctccactattgtcccatgaccctgccaaatccccctctgtgagaaacacccaagaattatcagtaaaaaaataaatttaaaaaaaaaaaaaaaaaaaagaattttgtcgccaggcacagtggctcacgcccgtaatcccagctctttgggaggccgaggcgggcagatcacgaggtcaggaggtcgaggccacagtaaaaccccatctctactaaaaatacaaaaaattagctgggcgcagtggcgggcacctgtagtcccagctacctgggaggctgaggcaggagaatggcgtgaacccggaaggcagagagcttgcagtgaggcgagatcgtgccactgcactccagcctgggcgacagagcgagactccatctcaaaaaaaaaaaaagaattttgtgaatattttaaaattcccacaagataccacctaatgccacaatttaaacgtattgctctaattcatggatttcaaaaacattaatatatgctttttacttcttaccaatgttaatttttttacccttccaaacatgtcaattagtacaatttaaaagtccaatcatcctttaataaaacctgttggaattcactattgcgtcatctttgtgttgccatctagcctgaaaagaatttctggaaaaaaagtgttttgaaaagttcatgctacttacaaaatttatttattttttatttatttccttgcatcaaattaacaagtccctgctaatatctagtatattaccatatgctcactcaatggcacaaaccagtcttccactaaagtagaaaagaggtaaggagaaacatgtcactgcttgttgttctatcccgatacttaaatcaaactcacttctttaataagtaattatttaaaaatctgtacttttttctagacttttcccaaaatatgtctgcctccaaaaattatgaatccattttggcaactaatggggtaaagaaacaaatgttttttttaatgttagtcttttcacataatgcgaactcattcatcactaggttctctttcccaaaggtttgccaagtcacaagacacactactgtttacaatccctcccatctgccccttgccaatatatatcaaacactctagtcacttggcttaagccacagtttcccaaataaccttctcaaattctaatttagacccaagatgcattcgttctgattcatattcttaatggaaaaattttaaatcacctgattttcactaagttctgccttttgatgctgccaaatcctagagccctcttgctttcacaccaatgccccaaatgtgacagctatagttatctatcacagataagtataaagtatagataactatacttttaaattctgtacttttagacatatttttaatctgagtaccgtaccctcttggttttcaaagacaactaccaacattcaattcattcgagcacaagtcttcacttcatttcattactatatacaccatgttctttaaggtgggagcctactgatttcccccgaccccagactgcagtaggaaaagaaatgaaacaaaatatatttactaacattctatttacagataactatcaaacagttcccatttttattacaggcttcctgttacatagtatcataaatgcctattgtgcaggatgtttgtcgggcatctatactgatggtctccaaaatcaaacaatacttcagataatgctgcgggaggagggaggggagtatgattcaccaaaaactgcagtgaagagtaatggaatattttcaccggtggtatgttataactaatagcttctttctttccttttttttttttttttttttgagacggagtctcactctgtcgcccaggctggaatgcaggaatgcagtggcgcgatctcgactctgcaacctctgccccccgggttcaagtgattctcctgccttagcctcccgagtagctgagattacaggggcccgccaccacgccccgataatttttgtatttttagtagagacgggggtttcaccatgttggtcaggctggtctcgaactcctgacctcaagtgcgcccgcctcagcctccctaagtgctgggattacaggcatgagccactgcgcccagccagcttcttgggagaggaaggtactgctaagcaaccatcacggtagcaataaatccaccagcttcgaaggccgcaaagctaggaagataggtggaaaagcggagatggggtcctcccacagcttctctagaggttaggagagaacaaagtcactgctgcactgtcacttgagggaaagggggagggggcggatcatcttggaaacccagcccctgggctggagcaggcggggagaagtcagagaggctgcctaggattaacattctcgttctcaccctctcccgcccttctagaagctcccctcctcgctccaacgcggcggccagagtcccaaatgaccactccctccaatctatcacccgagaggtgtagagagaaaccaaagaaagaactgagtcaggtggttaggcagagcggggactcccatgacctctccgtcctcccccaacaccctccagcctcccccggaacactatcaagcccagaagggtccggggcgggggggaaagccccacacaggtgtgctcgccggggaggggcgcaatggccgggccgccggctccccagagctcccgcagcgcggcctcagcccgagccccagcctcagctccggccacggtccctgccccggccccagccccagccccagccccagccccagccccagccccaacagagaaaggcagagcacgccgaacccggcgccctgcggccgcccagccccgactcgaggcccgcccgccctcccggccgggccctgagtccagcccgcgggcgcggcctaactgctcgccccgcagcttgccccggggcccgagggtcgctgtacctgggcggcggcctccagcttgccctcgaaggtgaagtccagcaagtcgggcttgaggcaaaggctgcagttgatgggggagacatcggcaggcagccgctcgaagggcctcttctccggcatcgcggcgaggcccaggctgtggaggcggcggcgagaggagcggctgaagacgagaaggaggaggggaggaggcggagggccgaggaagagcaggcggcgagcgagggagggggcggcagctgccagccacatccaccgagcgcgggcgaccgccggaggagagcgaccgggggagcctggggggcgggggagagacccagccggagcgctaggggttgggaaggaggcggtgcgggcggactggcgggcgagctgcctacggggaagggggcggaggggagggaaggggaggagggccagcaaggagggatggagagggggaagtggtggcggcggctgcgtgcgcggccccgccggccgggcgcgcccccgtggagtgcgcgcgcacgccggggcagagggcggagcggcgaggacgagggcgcggccggcggggcgggagggcgtagggttgcccgcgcgagcgcagggcgggaggcgggcgctgcacctgtcggcgccgctcaggactgggggcggccttccaactggaaggagccgggaagggcttgatcagaggaaggaaaggcataaggggccctcgggaaactgaagcctacgcagttggtcagttcagccagggtcgcatgcataaaataccagttacaagcaaaaccccaaactggattctgcctccaggtcagcgaaaagccctgacttgagcctctctggcctcagttcctgttagtagcaaattcaaaggatgatttgaaagttttgttataaaacctttaatagccgggcgcggtgtctcacgcctgtaatcccagcacttcgggaggccgaggcgggcggatcacgaggtcaggagatcgagaccatcctggctaacatggtgaaaccccgtcgctactaaaagtacaaaaaattagccgggcgtggtggcgggcgcctgtagtcccagctactcaggaggctgaggcaggagaatggcgtgaacccgggaggcggagcttgcagtgagccgaaatcgcgccactgcactccagtctgggcgacagagcaagactccgtctcaaaaaaaaaaaaaaaaaaaaacctttaataatctaggttacttcaaccaatgagatctggacttttgagggagtgatttcaaaaactatatttttgtttccatgatttaatgtttaaaatgggatgtttcgggcggtcgcggtggctcacgcctgtaatcccagcactttgggaggccgaggcgggcggatcacaaggttaggagttcaacaccagcctggccaatatggtgaaaccccgtctctactaaaaatacaaaaaaaaaaaatagccgggcttggtggcgggcgcctgttgtcccagctattcgggaggctgaggtaggagaatcgcttgaacccgggaggtggaggttgcagtgagccgagattgcgccactgcactccagcctgggcgacagagtgagactctgtctcaaaaaaaaaaaaataaataaataataaaataaaatgggatgtttcaccttttccccattttcatctttgtttctttttaaactaaaagatccttcagcaatcatggcctctttaatggtgaactatctgtggctctctcagttctgtagataccttgcaaattgaggaggtatatatataaatgcatatatatatatatatatatatatatatatatatatataatgtaactgaaattatctttaaaaaggggggccagggccaggtacggtggctcacacctgtaatcccagcactttgggaggctgaggcaggtggatcacgaggtcaggagttcgagaccagcctggccaatatggtgaaaccctatctctactaaaaatacaaaaattagcctggcatagtgtcatgtgcctgtagtcccagctactagggaggctgaggcaggagaatcgcttgaacccgggaggcggaggttgcagcgagccaagatcacgccactacactccagcctgggctacaacgagactctgtctcaaaaaaaaaaaaaacagtgggcccaggtgtggtgacgtgtgcctatgatcccagctactcgggaggctgagacgggaggatcacttgagcccaggaggtggatggaggctgcagtgagctgtaatggtgccactgcactccagatgacagagtgaggccctgtctctaaaaaaataaaaatgaaataacaatttaaaaaatgttatttaaagtgtcaaaggcaaggagatttatccataatcttcatatttctttatagaaatttctcagatagaaccctgtaatttccaaaactgaatgtagtatgttgtaatggaccagtactgtccagcagaaacatactgtgaaccactaggtagtattaaatcttacagtagccacatcacaaaaaagtaaaaaggaaacaaatgaaaacacatcttatttaacccaacatatccaaaatattatcatttcaacatgtaatcaatataaaaaatattaatgaggccgggcacggtggctcacgcctgtaatcccagcactttgggaggccaaggcaggtgaataacctgaggtcaggagttcaagaccagcctgaccaacatggtgaaatcccgtctctactaaaaatacaaaaattagccaggcatggtggcgcatgcctgtaatcctagccagctactctggaggctgaggcagaagaatcacttgaacccagaaggcggcggttgcagtgagctgagatcacagcactgcacttcagcctgggcaaaaagagcgaaactccgtctcaaaaaaaaaaaaaaattaatgagatattttacttattttcttcacaccaactttgaaatccagcgtgtattttacatttatagcacatctaaattctgactatccacatttcacgtgatcagtagtcacgtgtggttagtggctcttgtactgggcagcacaattttggactctgggcctggcctcttagcctctgaatcctacatacttttcagaaaggcagattgaaaatctgcaatcctttcaaactaaggtgtgagatggggccttttcttatatatatgtagttctatgaccacttactggtcagagaaataataatttaaataacatataataatttttttttttgagctggagtctcctctgtcacccaggctggagtgcagtggcgtgatctaagctcactgcaacctccacctcatgggttcaagcaattctcctgccccagcctcctcagtagctgggattacaggcgcccacgaccatgcccgactaatttttgtatttttagtacagatggagtttcaccatgttagccaggctggtctcaaactcctgacctcaggtgatctgcccacctaggcctcccaaagggctgagattacagacatgaaccattgtgcccagcccatataataataacttaattaactgtaattgaatgtttatcgagtgcttactaaacactttttttttttttgagatggagtttcgctcttgttgcccaggctggattgcaatggcatgatattggctcctgcaacctcggccccccgggttcaagcgactctcctgccccagcctcctaagtagctgggattataggtgcccgccaccatgcctggctaatttttgtatttttagttttatttgtttgtttgttttgttttgtttttcttgtttattttttctttttttctttttatttctttttctttttttaatttttgtatttttagtagagactgggtttcaccatgttggccaggctggtctcaaactcctgacctcaggtgatccacctgcctaggcctccctaagggctgggattacagtcatgaaccaccacgcccagcccatataataataatttaattaactgtaattgaatgtttatcgagtgcttactaaacattttgtttttttttcttttgttttgggttttttttgagatgcagtttcgctcttgttgcccaggctggagtgcaatggtgtgagctcggctcactgcaacctccacctcctgggttcaagcaattctcctgcctcagccacccaagtagctgggattacaggtgcccaccaccacacccggttaatttttttgtatttttagtagagatgggatttcaccatgttggccaggctggtctcgaactcctgtcctcaagtgatccgcccacctcggcctcccaaagtgctgggattagaagtgtgagccactatgcctggccaacacttttcatatattaattcatttaattattctcaacaactctgtgaggtggacaccattatccccatttcacatttgaggaaacaggcacacagaaattcaaggacttgcctaaggtcatacactaataattggtagagccacagttaggacctaggcattttttttttctctcctgagaatcttgcagcagattccctgttgttctgactctccagttttgttttgttttgttttgtttttgagacagagtctcgctctgccgcccaggctggagtgcagtggcacgatctcggctcactgcaagctccgcctcccaggttcaagccattctccttcctcagcctcgcgagtagctgggactacaggcacccgccaccaagcccagctaatttttcgtatttttagtagagacagggtttcaccgtgttagccaggatggtctcgatctcctgacatcgtgatccgcccgcctcggcctcccagagtgctgggattacaggcgtgagccaccgcgcctggccctaactctccagttgtattttattatagttcgtctgtttctcagcttctcaaaatgttattttcattatgtctgttaaagcaaatttaattcataaccatttaaggctctccatgaactgtccttatcattttcccagacttgttttttcttatcctttaacatatattctccagtcttaacaagctaaccagtttaatgcttggcccttacagcttgctcattcttctcttctctaccattgctcaggcattattgctggtatgacctcctcatctttttcggcaaaccggggcccctcccttccttcaacactcaccttttccagaaagtcctcattgactaactccacccaactctcttttcccatcagttcacaagtactggcttttgctgatttatttgtacttgttctgactgttactctgtaattatgttgttgtttttgttttattctggtttttttctgagatggagttttgcttttgttgcccaggctggagtgcaatggcacaatctcggctcactgcaacctccgcctcctgggttcaagcgattgtcctgcctcagcctcctgagtagctggaattacaggcatgcgccaccatgtctggctaattttttgtatttttagtagagatggggtttctccatgttggtcaggctgatctcaaactcccgacctcaggtgatctgcccgcttcggcctcccaaagtgctaggattacaggcgtgagccaccgtgcccggcctataattgtgtttaaatttattttatatgtgtatcttcgcaagatgtactactagtaagagcttgtttcctaattcctttattactctcagtactggaccctgcacaaagtacatctcaattattattgagctgactaaccaattaaccaagagacaatattttacccagtctgtagcctttcctgtatgtacaagatgtgtgccccatagagaaactacgtgaacctaagactggaggcaactttcttttataaaatcacagaaaagattaaaaacaaaacaccaggctaggcaccatgcctcacgcctgtaatcccagcactatgggaggccaaggtgggcggatcacctgaggttgggagttcaagaccagcctgaccaacgtggagaaaccccatctctactaaaaatacaaaattagctgggcgtggtgttgcatgcctgtaatcccagctactcgggaggctgaggcaggagaatcgcttgaacccaggaggcagaggttgcagtgagccaagatcacgccattgcattccaacctgggcaacaagagtgaaagtccatctcaaacaaaaacagaaacaaaaacaaaacactagggccacagacttcatggcagcagtaatttttgatcctgctgaggagaaagaagagaaccttacttggccccatccttggtcctatgatccaagagattccaatgcagcaagtcaagaataaacccacacttagaacttgggctacaggaatggaaggtaacacacagttcccttaaatatgactggatgaccacttaacatatgctccatacaggcttctctgaaataacagaaattagaacacaagggcccttggaaattcatttccctccatggtgcttcagaaggaatgggaaagtcagtaatgtcccaagatccttagccctacttttaacaggcttctaggcttctctgtttaccacacctttgaaaatctgcaaatgaaaaacctatggaagtccatatatatcaataaaaagttaacaaagatttgggagactgaggcaggaggatgacttgaggccaagagttcaagaccactctgggcatcatagtgagactcccatctctacaaaaaaagaaaaaaaaaattggccgggcgcggtggctcacgcctgtaatcccagcactttgggaggccgaggcaggcggatcacgaggtcaggagatcgagaccatcctggccaacacagtgaaaccccgtctctactaaaaatacaaaaaaaaacacaaaaaattagccgggcttggtggcgggtgcctgtagtcccagctactcgggaggctgaggcaggagaatggtgtgaacccgggaggcggagcttgcagtgagctgagatcacgccactgcactccagcctgtgcgacagagcaagactccatctcaaaaaaaaaaaaaaatgtttttaattagctgggtgtggtggcctatgcctgtagtcctagctacttgggaggctaaagtgggaggattccttgaatccaggagtttgaggctgcagtaagctatgactgcatcactgcagtccagcctgggcaacagagtgaaatcctgtctctgtttgttttggtttggtttgtgtttttttttttgagacaaagttttgctcttgttgcccaggctggagtacagtggcacaatcttggctcactgcaacctccgcctcccgggggttcaagcgattttcgtgcctcagcctcccaagtagctgggattacaggtgcctgccaccacgcccagctaattttttgtatttttagtagagagggggtttcaccatgttgaccaggctggtctcgaactcctaacctcgggtgatccacccgcctcagcctcccaaagtgcagggattacaggcatgagccactgcgcccggccgaaatcctgtctcttaaaaaaaaaaaaaaaaaagtttaagaaaggaaaaaaaaaaggccgggcgcggtggctcacgcctgtaatcccagcactttgggaggccgaggcgggcggatcacgaggtcaggagatcgagaccatcccggctaaaacggtgaaaccccgtctctactaaaaatacaaaaaaattagccgggcgtagtggcgggcgcctgtagtcccagctacttgggaggctgaggcaggagaatggcgtgaacccaggaggcggagcttgcagtgagccgagatcccgccactgcactccagcctgggcgacagagcgagactccgtctcaaaaaaaaaaaaaaaaaaaaaaaaaaaaaaaaaaaaaaaaaaaaaaaaagaaaggaaaaaaaaacaatcagtcattctagccagagccactattgttttcagttttcaagtactagcctgacaaatatgaggacacaaaaagaaatagtttcaatatcatcactgactttatgacctaaaacaagtcctagcaattctctgcctcagtttccccatctgtaaagcagatatgggcataatgcacgcttatctcaaagaaaagtatgatttctccagtggtttgagaatttcttaaaaagcctattattgggccgggcatggtggttcatgcttgtaatcccagcactttgggaggccgaggcaggcagatcacttgaggtcaggagttcaagactagcctggcgaacatggtgaaaccccgtttctactagaaatgcaaaaaaattagccgggtgtggtggcgggtgcctgtaatcacagctacttgggaggctgaggcaggataattgcttgaacccaggaggtggagtttgcagtgagtcaagatcacgccattgcactccagcctgggtgacaaaacgagaccccgtctcaaaaaaaacaaaaaaaaagcctattattttcttaatgtgagaatggtctttgtagcaggactagtaaaaagttgaagtaaaattatagagagcaaatgtaagtcatcgaaagaagtatttcagagcaaagataatgtaaaggaattggattagggaggcaaaatattcaggcaggaaggagagaaaccccagctatggaacacagaaagagaaagatgtggagcgtttgagagaaccattacaaaaccaccaagttagatcaaaacaaagcattacagttactgtttagcctctctgacttacaaattatggccttcaatgtcaatttcaagcatacaaattataactcgaattccactaatatgtgtcttacctgcggaatatgatgaaggggttccaaaggccaggaacacaaaaacttggagagcaatccatggaaaatgatgccatgaggtcccagccttgactcttccgtaacttaaaatggatgttgaaatgacagttggaaatgtgagtagatggaatgctgcctacccatcctgtgttcttcatgaaaggaaagtagattaatttcacatgctttaaaatgtttgctatactgatggataacttaatttgtcataataatatgtgagctatagattggatagattgatggatagatacatagttttatttatgtggggatagcaatatgacattatgcacataaaaatgtggccaaaggaaggtcctatctggtcatagttttatttctcttggtatctttccatcaggaagttgaaaaagtcatacatttccacctttctcacttcctttctagccctccttttttttttttttttttcagtacttctgcttcccttttcacaactacttctgcaggtctgtttaccaatcccaagggagtgacaactacaagagcaaacctaacccctttgttgatgatcttcaaactgagatgacctgtttggctgtgacctgtttggttgtaaaggattagccaccagggctttgcagaatataagttagggagccaacttatatgatagggtgaagccaataccctctgctgcaaagagtgcatatgtctgtgtctgatgcgtgggcctctggaatgctactataacatttctcctgaaatcccaagtctttttttttcttttttgagacggagtctctctctgtcgcagtggtgcgatcttggctcgctgcaacctccacctcccgggttccagcaattctcctgccacagcctcccgagttgctgggactacaggcgcatgccaccatgcctggctttttttttattattagtagagacggggtttcaccatgttgtgcaggctgatctcaaattcctgacctcaggtgatccacccgcctcggcctcccgaagtgctgggattacaagtgtgagccaccgcgcccggcgaaatcccaagtttttaaaggttacggtgctctggagctggcatgctggaattgagtttgcaatgatgtttgccttgacgtcaaatccaaaaaaatcagtgcgagctcaggttgaaccagaccagtggggtagccaagaggattagaagtcgcagcttggcaagtcagggggcctcagtttctccatccttggctctatttctgtttgcttcttaaatccttgacaagaagaattgacatcagaatagtcctcacccaatgtgctatccaaggcctagcaaagagaataagcttaacccaggttaagagttgggtgaagagaagagacccaagacattaaggcctactaatctggcagaatcacatctcatggggtgtgattttatgagagcaatttgccttggagtcttagacacataaataactaaggataagaatattctgctgccagcctccctacagtttgagagagcaatttgccttggagtcttagccacataaataactaaggataagaatcttctgctgccagcctccctacagtttgcataggagtcaagattaataaatacttaaaaagtgtaaggggagctaaaaattggcttgtgacctgcttattcataggactgaaccaaaagtcatagtgtccccagtaaacaaataatgctagagctaaagagaaaccataaggtaagcatctaagatcctttcattttcagatatacatgctttagaaaaattgtcttggcatggagactagcctttgggatctagtgccttgaaaaaaaatctgatggtaacatctctattttggtaaattgattcaagaaaaaggcaaagagacaaaaagcaattcaaactgctcatactctttagccctgggaagcctgcaccggcaggtttctggatatggtctattttagttcaaagtgcaatcacactgtataaaatataaagtcactaagaatgaggcatagcacaaataccctagggacctgacatcaggaattagggcaggtcacaaaagaaaaagaacaaaactcagagcttcactcttgttgcccaggctggagtgcaatggtgcaatctcggctcactgcaaactctgcctcctgggttcaagcgattctcctgcctcagcctcccaagtagctgagattacaggcatgcaccaccacgcctggctaattttgtatttttagtagagacgaggtttctccatgttggtcagactggtctcgaactcccatcctcaggtgatccgcgccccctcggcctcccaaagtgcagagattataggcttgagccactgtgcctggccaagacaaaattcttcaggcaaaaaggcacagtataaaccattcaagagagatttatattcctgttgccccaaacctacattagctgttaagtggaggccacagttttagcaactctacatcaggaaaccctgaactcttgttgtgccctatcccaatgtgtctcagtgccaagagatgccaaacgatgtcatctttgtttagctctatgtacttttgctaaagtgattcattactgtcttatctcaatgtaagaggatatcagtagatgcaggagagggtgacagaatcaaaggagtggaggaggtggaagaagagaaaaaggcgtcactattttacagaaaaagtgccattattggtgtctgacaaggtaaatcgttttctttagtttataagccctacctccttttattttttccagaaattagaacattagttctatccaggtttggttcagacttgaattgtacaagttgcagttcttagagctgataccagggtcccattctgtcacccaggctggagtgtggtgatgtgatctcagctcactgcaacatctgcctcccaggctcaatgatcctttacctcagcttcccaggtagctgggactacaggcatgcaccactaggtccgtctagtttgtgtggagttttttggtagagatgggatttcaccatattgcccaggctgatctcaaactcctggttcgagcgatcctcccgcctccccaaagtactgggattatagatgtgagccactgtgtctgccctaaaatggtaaaatctttaaggcccttgttttccctaatttttcctccccttcatggtaaagaagtccagtgtgctatgttactaacgctaggattcataacttacattttaaggatagccaaagtaagttgaagattacttcctattgtttcattctttataattgttttagggggcttcaaatacaaggggtcaaaaactgacgtaggacaaagatagatgcagtcattgcccagagttaactgcaaagcaatgactaaaagccatgatgagaagaatttctgactcccaggcctctcttctttctgaatatcctagcagtcctagataactgtcagaggacaagtgttgaaatgtgttgacaagtgttgacaaggaggaccacacataccctagattttccaggacagtcctgatggcaaatattctccactgtcatcagaacccatgtaaataaatgtcctagaaattccaatattctagcattttgggttaaagaaaatggaagaagaactgcatgcctgggagtcaaggcaaaaagggcacatgatagttggtgtcaaggccaggtaacaggaaggagacagaaagatctgattgctagaataaccaggcagctcaaatgagggtaatagaatcttgtgcagcacagcatcatgatggtaaaaaaaatgctctttccatgagtgcttaaagcagactcagagaaaagttgctgttttcaacccacctctggagtactagtactccagcctccattagtcaggcttccaccctggagatctgacatagtatgacaagtcctacaaagccaaacaatgaggtcatcctttgtaggttacttcattgtgggtgataacttcatcaggaaaaaatatgttcattcagcatttttcaagtcctcaaactgctttatgaaatcaagtctgttcattcctctctaggaagagcaaacctagcaagagaaacaagttctctaggtttatacatctatatggttaatcctaggctcttagcccctacttaaacaaatcctaaccctagagatctaaatgaaatattctctttatttagtacgattaatctattaccactctgaataattggaaatatatttaaatgcttttcatagtgtgagagacagaatggaaatccatggagcagaagaaaggctcagttcttctccttttaccatgatcatgataactttataattccatgtagtaaaccctaagggcacgttctcatcagccaggttagagccccttgttctacagagtaatgaaggagttagaccaagtatctttccccagtaatagggtggccagataaaaaaacaggacacctagttaaattagaattgcagataaaatgaatagttttttagtgtaaatagtctcaactatttcatgggacatgcttagacacatgcttagactaaaaatatgcaatagtttgccgggcgcagtggctcacgcctgtaatcccagcactctgagaggccgaggcaggcggatcacgaggtcaaggagatggaggccatcctggctaacacggtgaaaccccgtctctactaaaaatacaaaaaattagccgggcgtggtggcgggtgcctgtagtcccagctactcgggaggctgaggcaggagaatggcgtgaacccgggaggcagagcttgcagtgagccgaggttgtgccattgcactccagcctgggcaacagagtgagactctgtctcagaaaaaaaaaaaaaaaaaaaaaaaagcaatagttacaagttaggttactaaatactaaaaactattcattgtttatctgaaattcaattattattattattttttgagacagagtttcactcttgttgcccaggctggagtgcaatggcgcgatctcagctcaccgcaacctccacctctgcctcccgggttcaagtgattcttctgcctcagcctcccgagtagctgggattacaggcatgcgccatcacgcctggcgaattttgtatttttagtagagacagggcttctccatgttggtcaagctggtctcgaactcccgacctccagtgatccacccgcctcggcctcctaaagtgctgggttgtttttttgttttgttttgttttttgtattttttagtggagacggggtttcaccatgttagccaggatggtctcgatctcctgaccttgtgatccacccacctcggcttcccaaagtgctgagattacaagttttcttttttctttctttctttctttttttttttgagataaggcctcactctgtggtccagactggagtgcagtggcgattacagctcactgaagccttgatctcctggactcaggtgatccttccacctcagcctcccaaatagctggtactacagggatgcaccacaacatttggctaattttttttttttttttttttttttttttttgagacagagtctcgctcagctgcccaggctggagtgcaatggcgcaatctcggctcactgcaaccaccctctcccggattcaagcgattctcccgtctcagcctcccgagtagctgggattagaggcacccatcatcatgcccagctaatttttgtattttagtagagacagggttccaccatgttggccagcctggtcttgaactcctgacctcaggtgatccacctgcctcagcctccctaaatgctaggattacagctgtgagccgccacgcccagccttttggctaatttttgtatcttctcttttttagagaagggactttgccatgttgtccagactcgtctcaaactctgggctcaaatgatctgcctaactcggcctctcaaagtgctggaattacaagtgtaagccactgagcctggtccgaaattcaaatgcaattgggcatgctgtatttttatttgctaaatatagtaaccctaccagtactatgctttcagattttttttttttgagatggagttttgctcgtttcccaggctggattgcaacggcatgatctcgcctcactgcaacctccacctcctgggttcaagtgactctcctgcctcagcctcctgagtagctgagagtacaggcgcccgccaccacgcccagctatatatatatatatatttttttgagacagcctctcactcttgtcgcccaggctggagtgcagtggtgcgatctcggctcactgcaacctccacctcccaggttcaagcgattctcctgcctcagcctcccgagtagctgggattacaggcgtctgtcaccacgcctggctaatttttgtatttttagtagagacggggtttcaccatattggccaggctggtcttgaactcctgacctcaggcaatccacccacctcagcctcccaaagtgctgggattacaggcgtgagccactgcgcccggctttttttttgtatttttagtagagacggggtttcaccatgttgtccaggctggtcgcgaactcctaacctcaggtgatccacccaactcagccttccaaagtgctgagattacaggcgtgagctaccttcgcccggcctgctttcaggttttttttttttttttttttttgagacagagtctcactcttgttgcccagactggagtgcagtggtgcgatctcggctcactgcaacctccacctcccaggttcacgccattctcctgcctcagcctcctgagtagctgggattacaggcacgtgccaccatacctggctagtttttttttttttttttttttttggagatggagtctcgctctgtcgcccaggctggagtggagtggcgcaatcttggctcaccgcaagctccgcctcctgggttcccgccattctcccgcctcagcctcccgagtagttgggactgcaggtaccggccaccactcgcggctaattttgtggggtttttttcttttttgtatttttagtagagatgcggtttcactatgttagccaggatggcctcgatctcctgacctcgtgatctgcccaggtcggcctcccaaagtgctgggattacaggcgcaagccactgcaccaggcccatatctggctagtttttgtatttttagtagagatggggtttcaccatgttgtctaggctggtctcaaactcctaacctcaggtgatccacccgccttggcctcccaaagtgctgggattacaggcatgagccgtcacacccggggtaaatagggattttaaaatagctttgtgtgctggcaaatatctttttctggagagtggaatgacattctgtcatgtttaattttttaggctaggagaccgctaaaagggatatctaactctcttctccttttcttattccctagggtattcactttagtggaaaacagcataggttaatatcaactggctccataaaaatcaacttgtccctttaaatatatcaaatactttaaatagtttttccaatattaaatatccatgttcagaatatggtggtgattatgctgtattaataagagaaattactttgagagtgatgttggcaagattatgtcaagtagcagccaagggctgatataccacactgtcaaaccaatgattttttttctttctttcttttgccactgttactatattaatatacttttagtatttccactcacctgaaaatgatgcaggcagatattataaacctgattctgccactcctgcaaatatcaaagcttaaacattttaatggggaggaaaaaaaaacactctgaagaataaatattcataggattttaatccagaagtatcccaacaggcgcagtggctcatgcctgtaatcccagcactttgggaggccgaggcaggcagatcacctgaggtcaggagtttgagaccagcctggccaacatagtgaaacccccgcctctactaaaaatatgaaaattagctaggcattggccggacacggtggctcatgcctgtaatcccagcactttgggaggctgaggcgggcacatcacgaggtcaggagatggagaccatcctggctaacacagtgaaaccccgcctctactaaaaatacaaaaattagcctggcgtgacggcaggcacctgtaatcccagctacttgggaggctgaggcaagagaatgacaaacctggaaggtggagtttgcagtgagctgagatcgtgccactgcactccagcctgggtgacagagcaagacaccgtctcaaaaaaaaaaaagattagccggacgtggtggcaggtgcctataatctcagctactggggaggctgaggcaggagaatctcttgaacccaggaggtagaggttgcagtgagccaagattgcgccacagcactctatcctgggtgacagagtgaaactccgtctcaaaaaaaaaaaaaaagtatcccagccaggtgcagtggctcgtgcttgtaatcccagcactttgggaggccaacgcgggcggatcacgaggtcaggagttcaagaccaggctgaccaacatggtgaaaccctgtctctactaaaaatacaaaaattagccgggcatggtggcatgtgcctataatcccggctactcaggaggctgaggctgaggcaggagaatggcttgaaactgcaaggcagaggttgcagtgagccgagattgcactgagccgagattgcatcattgcactgcactccagcctgagcgacagagtgagactcttgtctcaaaaaaaaggtatcccaacagagtttcacattttaccataacccacaggagagaaatcttttctataatcattaataatttagttctttagaaaaatcatttcctcttcgtgtgatttttcttgttttagacgtggtctcatgatgttggccaggctggcctcaaactcctggactcaagtgatcctcctgcctcagcctcctgagtagttgggactacagggatgtgccacgacttgtttatcaagcagttattgagtacctagtgtgtgccactcagtggcttgtaagtggcagagccagtggcagaagccaggttaccttgactcagaacaggcactctttcccaatacttggtcttcccatgatctctttctggaactcccagggctgatgtaatataacccaaagaataaactggaataagacaaagagaaataaagcttgagtttccatttagctcttccctgacaggtggtacataacttagcccattcaagagcagatgagtttccatcacctgttttgtttaaatattaagaactattaaaagacattattttcccttgatggttatcagaatcttctggctttccaacagtgccacccaaatcctttatctgtctagaaccccttgctgtttcagtttcttcatctgtaaaattaggtaatggattagatcatcttcaaagttctttctagctctaaaattattttattctactaattttctgtggaaaaaaattattatgctcaggtccatcagctttggctaatgagggctgcactccacagtttgaaaagtttaggaaattcccggcctggtatggtggctcatgcttgtaatccccgtacttccagagggcaaggcaggcagattacttttgcccccaagtttgagaccagcctgggcaatgtggcaagaccctgtttctaataaaaaggtaaaaatggcatatcatccatggcctttttacttttccaacacagtctgggaaattattaataacaataaaatctctacagagtactctttcctaattactttgaatattttcctttctcacaatgtcattgagacacaagaaggtattattcatccaccaaaaatgagaaactggacatacagataggtcgtgcacttttttttttttaaatggagtgttgctctgtcacctaggctgcagtacaatggcgcggatgtccattcactgcaacctctgcctcctgggttcaagcgattctcctgcctcagtctcctgagtagctgggactacaggcgcatgccaccacaccggctaattttttgtatttttagtagagacggggtttcacatgttggccaggctggtctcaaactcctgacctcgtgatccgcccacctcggcctcccaaagtgctgcgattacaggtgtgagccaccacgccccgcctaggtcgtgcacttctaaaactcacagtaagtgggagtagatctaaaatgagaaagtggatctctctgctgactgcgtctcttgtccaggctttttatccacagtaagctttctggttaatgtacagaatgtggaatgctcattaattgctcttggaaaatgaacctgtctcttcctcccttcctacttcaaaaaaaaaaaacacacacaaaaacacagaaaaacaataataccctcactttactaaatgagcaagaggaaaaaaaatgaatctggccaggtgcggtggctcatgcctgtaatcccagaactttggaggctgaggcaggtggatcacttgaggtcaggggttcaagacaagcctggccaacatggtgaaaccctgtctctactaaaaatgcaaaaattagctgggcatggtggcacacacctgtaatcccagctattcgggaggctgaggcaggagaatcacttgaacttgggaggcggaggctgcagtgatccgagattgcaccactgcactccagcctgggcaacagagcgagaccgtttcaaaaaagaaaagaaaagaaaagaaaatccacagtaggcgccatctggaatggctcaggtgatagccagtcacctggagcagagaaaaagctgtggtcactagtaatttcagtatttcagtgatgtttcccaccaccagctgtcatcataatttccagaaaagctgccaagaaaaagcaggaatttgcatttcacacaaccctaaacacacacacacacacacacacacacacacacacacacaatggatcttcctgactgctctttgccctcatatcttccttccctcaagcattccagataaacaggtaaggtacttgactcacctgcagctgaataactcagtactcttgaaggcgcctcccttctgccagcaatccttactcagttattctttccttccctaatctggattgtttccttgaaaccaaaaaccccagtaataggtgccttatccctacttcccctttttcctttctcctcttgccatccctcattccaaacaatacactcaggtctgtagcgatccaggctcttatcacacttaggaggtaactggccattgaagtgcttatctttattttgacaatatgtgacatgtttatgttctattccaatccagcacagtgtctgccccattgttgggactcagcaaatgtttgttgaatagaacttgcctaaattggcctcaggcatctcctaaatttcacagtatgctgaattccagggaaaactagaccgactaagccaactgctcccttcctgtctgggaggacccacccacagagcagaaaggggaagctccacctctgcagacagagagggtttgactgatgtccctcctccgcctgtgatcccaccccattctccttcctctgtcacaggctaaggcagtcctggaacgcctacccccccaccccaaccccccagaatgatccaggccattttatgtggcagagctgctaatagaacaggctgtgtattagatagggttcagggtagagatcagagcctgaattttattgtagggatcactaagaaagttagattagtttgtgttgggttgttttttttttttttttttttttttttttttgaggcggaatctcgctctgtccccaggttggagtgcagtggcgtgatctcggctcactgcaacctccacctcccaggttcaagtgattctcctgcctcagcctcccaaatagctgagactacaggtgtgtgccaccacacctggctaatttttgtatttttagtagaggcggggtttcaccatgttgaccaggctggtcttgaactcctgacctcaggtgatccgcctgcctcagcctcccaaagtattgggataacaggcatgagctactgtgcctggcgttagattagaatttgatatgaacctaagtagactagtctgagacgtgtctgtagggattgagagtgtgaagctctagagacctaatgtctaggttcaaatagtgtcagtgcaactttttaaccatttgttacacatttaaccataagttacacaagttacttaactgccctatacctcagtttcttcactcatgaaatagggataataggccagacacggtggctcacacctgtaatcccaacactttgggaggccaaggtgggtggatcacctgaggtcaggagttcaagaccagcccggccaacatggtgaaaccccgtctctactaaaaatacaaaaattatctgggcatgatcggggtgtgggggcgcctgtaatcgcagctacttgagaggctgaggcaggagaatagcatgaccctgggaggcggaggttgcagtgagccaagatcacgccattacactccagcctgggcaacaagagcgaaactccgtctcaaaaaaaagaaaaagaaatagggataataacagtacctgtatcacaagattgtccaaaggattaaatgagttaaaacatgttagtgctagggctgggtattgtgactcacacctacaatcccagcgatttgggaggctgaggcaggaggtttccttgaggccaggagttccagaccagtctgggcaacatggtgagaccctgtatccacaaaaaattttgacaaaattaactggtcatggtggcatgggtctgtagtcccagctactcaaggggttgaagtgggaggattccctgggcccaggtggtcaaggctgcagtgagccatgattgcaccactagacgtcagcctggatgacaaagtaagactttgttggctgggcgtggtggctcacacctgtaatgccagtactttgggaggccaaggagggcggatcacgaggtcaggagatcgagaccatcctggctaacatggtggaaccccatctctactaaaaatacaaaaaattagccaggcgtggtggcaggagcttgtagtcccagcttcttaggaggctgaggctggagaatggcgtgaacctgggaggcggagcttgcagtgagctgggatggcgccactgcactccagcctgggcgacagagcgagactccgtctcaacaacaacaacaacaacaaaaggctttctctctaaaataaaataaaatacactaaaaataatttaatttaaaaataaggataaaaccatgttagtgctcaatattattactgaggagaatggctcttgaatagcagcaagtttactatgttgaggtttgtatttcttttatttttttttagagacagagtctcactctgtcgcccaggctggagtgcagtggcggagtctcggctcactgcaaactccgcctcccagattcaactgattctcctgcctcagcctccaagtagctgggattacaggcgaacgccaccacgcccagctaatttttttgtatttttagtagagatggggtttcaccatgttgaccaggatggtctctatctcttaaccttgtgatccacccacctcagtgtcccaaagttctgaaattacagacatgagccaccgtgtctggctcttttattttattttattattattattattattattttttgagacagagtcttgctctgttgccaggctggaacgcagtggcacgatcttggctcactgcaacctctgcctcctgggctcaagcaattctcctgcctcagcctcccaggtagctgggattacaggctcctccccctaccatgcccagctaattttttatttttagtagagatggggtttcaccatgttggccggggtggtctcaaactcctgacctaaggtgatccacccaccttggcctcccaaagtgctgggattacaggcgtgagtcaccgcgcccagccccttattttattttttgagatgcagtcttgctctatcacccaggctggagtgcagtggcgtgatcttggctcactgcaacctctgcccctcgggttcaagcaattctcctgcctctgcctctgagtagctgggattacaggcacacaccaccatgcccagctactttttttgtatttttagtagagatggggtttcaccatgttggccaggatggtctctatctattgaccttgggatcagcccgcctcggtgtcccaaagtgctgaaattacagacgtgagccaccgtgcccagctcttttttttttttttttttccgagatggactcttgctctgtcgcccaggctgaagtgcagtggtgtgatcttggctcactgcaacctccacctctggggttgaagtgattctcctgcctcagccttcccgagtagctgggattacaggcacctgccaccacgcctagctaatttttgtattttttcagtggagacagggttttgccatgttggccaggctggtcttgaactcctgacttcaggtgatccacccacctcggcctcccaaagtgctgggattacaagtgtgagccaccacacctggcctaatttttgtgtttttagtagagatgtggtttccccatgttggccaggctggtcttgaactccggacctcaggtgatgcacctgcctcggcctctcaaagtagtgggattacagacgtaaaccactgtacctggctgaggtttgtatttctttttcttttcttttctttttttttttttttgagacggagtcttgctctgtcgcccaggctggaatgcagtggcacgatctcagctcactgcaacctccacctcctgggttcaagtgattctcctgcctcagcctcctaagtagctgggattacaggcgggcgccaccacacccagctgctttttgtatttttagtagagaccaggtttcaccatgttggtcaggcgggtctcaaactcccaacctcaggtgatctgcccacctcggcctcccaaagtgctgggattacaggtgtgagtcactgcgcccggtgcagttgatttaaaaaaaaaaaaaaaactaaatgggctgggcatggtggctcacgcctgtaatcccagcactttgggaggccgaggtgggcacacttgaggtcgggagtttgagaccagcctgaccaacatggagaaaccccatctctacttaaaaaaaaaattaattgcacaggtaggagtaggactggtttgacagtatcttgtgtgaaaaaggttcaggtctcatgaaacccaatgcagtcagagtttcatgaaaagacacactgtcagatccagagaaagaatagtctccctgcattttaaactgactggttctgactgtcccatattaagaaagatattgagggctgagtgtggcggctcacgcctataatcccagcactttgagaggttgaggtgggcagatcacatgaggtcaggagttggagacaagcctagccaacatggcgaaaccccatctctactaaaactacaaaatttagctgggcacggtggcacacacctgtaatccgagctacttgagaggctgaggcacaagaatcgcttgaacccaaaaagcggagattgcagtaagccgagattgcgccactccaggctgggtgacataacgagacaccatctaaaaaaaaaaaacaggccaggtgtggtggctcacacctgtaatcccagcactttgggaggttaaggcaggtggatcgcttggggtcaggagttcgagaccagcctgaccagcgtgctgaaacctcgtctctactaaaagtacaaaaattagctgggtctggcgcctgtaatcccagctattcgagaggctgaagcaggagaatcacttgaatccaggaggcagaggttgcagtgagccgagattgcaccagtgcactccagcctgggcgacagagtgagactccctatctcaaaacaaacaaacaaaaatcaaacattaaaaagaaagaaaaatattgaggaactagaatatgcctaaatatgagatcatatttgaaaaagatctcataactttaccaggtgagaaagaatttgatggagtttggagatattattgatggggaagagaagactaatgtcctcaaacaggtataataaggctgacaatataaaactgtcaatgttcaactggtttgatctataaaaatagcattttcatttggttcaacctaatagaagaggatgtagacttattttttaatgctgcagagggcaaaccagaatcattgggtgaaagaaggaagcaaatgttacatcaatataggaaggaatttgtcacaatcggatgctcagaaacagaattaagtaccttacaaagatctaggttctttgtctgagagagcccaggcagagctgggtgacagtgtgttggggatatttaaaatattctgcattcagtgggagactctccatgatccagcctgcatttgcaccctggccaactggaccccacagtacagggacaacataccagaccacttagggcaccctggccatcccaagttcccaagttgttttacactgctgtgtcttcatgcatgtcaatccctttgcctagaatatttatttatttatttttatatgttttttattttttttgagacggaatctcgctgtgtcactaggctggagtgcagtggcgcaatctcggctccctgcaacctctgcctcccgggttcaagagatgctcctgccttagcctcgtgagtagctgggactacaggtgcatgccaccacgccccactaatttttgtatttttagtagagacgaggtttcaccacattggccaggatggtctcgatctcttgaccccgtgatccgcccaccttggcctctcaaagtgctgggattacaggagtgagccaccgcacctggccaaatttttatttttatttatttaattaattaattaatttattttttgagacagagtctcgccctgttgctcaggctggagtgcaatggcgcgatctctgctcactgcaacctccgcctcccgggttcaagcaattctcctgactcagcctcccaagtagctgggattacacgcacataccaccatgccctgctaatttttctatttttagtagagatgaggtttcacatgttggccagggtggtcttgatctcttgacctcgtgatccgcccacctcggcctcccaaagtgctgggattacaggcgcgagccaccatgcccagccccttggctagaattttatgcctccctgcaaattcctgctcatttcaagtgtgactcaactccagtgtggccccacctgaattctcaaaacggtctttcatgctctcctctgcaccaccttgtaccttgtgcttacttctgtagtggctgttatggttcttttgttatttttggtgtatttttctctttcctaccaaatataagctgcttgtggaccagaaacatttctctttcatttttatattccccagtgatttcagcaatatctgctacatggcaaatactcaataaaaaattcattaaatgaatgaggttcgacattttgattttatatatatgtaacatcaaaaagttataaatatgaattttgaatcaaatattattagttaataaaaaattaatgtctttactatgtgtgatgcacgattatattttctattctatattattcatttttttaaatgtaagtcatgacctagattccaaaattaacttgggttcccagccttattctgaaaaacactgaactgtatggtccacagcagggatttgaatggaaggtatcatcatggaaccctttgagaacccaatggaagctatgggccttcttgccagaaagatgcatacgtgtactaaaattgacattcaatttcaggggctccttggacccaccaaactccttctgagaatcacaggttatgagaaagttccttctaactctatgatcctatttttctgagaagtattaaaaagtagttgggcctgcctggacaacctggtgagaccctgcctctacaaaaaataaaagattagctgggcatggtggcatgtgcctggggttccagctacttgggaggatgaggcaggagaattgcttgagctcgaggtcaaggctgcagtgagactgtgctatgattgtgccactgcacttcagcctgggaaacagagcaagaccctgtctcaaaaaaaacaacaaaaaaaattaggtagctgggagctgggcatggtggtgagtacctgtagttccagctactcaggaggctgaggtaggaagatcttttgaacgccaggaatatgagaccagcctgggcaatatagcaagaatctctctaaaacaaaacaaaacaaaaagtattaagaagtagtcttggggctgggtgcggcggttcacacctgtaatcccagcactatgggaggccaaggtgggtggatcacttgaggtcaggagtttgagagcagcctgaccaacgtgctgaaaccccgcctctattaaaaatatacagttacctctattaaaaatacaaaaattagctgggcatggtaacgcgtctgtaatcccagctactcgggaggctgaggcaggagaattgcatgaacccaggaggcggaggttgcagtgagccaagatcacgccactgcactccagcctgggcgacggagcgaaagtccatctcaaaaaaaccccaaaaaagacctagtcttggaacctcaaacctctattaatcatctatagggagagcacaaatttggaggggagctacataaagaacaaagaatggaaagaaaattttgaggtgagacaggtaggatagatacgtacatgtgaaaaatcaaagagtgaagaacaaaagaaatcccgactaagggttaggtagaggggagaggtgtggcaatgctgactcaggttttcaggcctgcagtatctgattttcttttcagactattaggcttgggattgcagccctgtaacgttcttcttccctccctatggctccctctctcttcctcccctttaggcagcccttatggaaactctgaaactctttctcttttcttccagatggggagctctggcagaaagaatgttctggcctatgtgcaatgactgttttctctgccaatggataaagctaaaatctgctttcttggaaaccagctaatgtctttagaagcatgaccctagttaaggagagactgggacctttttttttttttttctgagatggagtctcgctctgtcgcccaggctggagtgcagtggcgcgatctcggctcactgcaacctccgcctctcatgttcaagcaattcacctgcctcagcctcccgtgtagctgggactacaggtgccggccaccaaacacggctaatttttgtacttttagtagagactgggtttcaccatgttggtcaggctggtctcaaactcccgaccttaggtgatctgcccacctcagactcccaaagtgctgggatcataggcgtgagccaccgtgcccagctgagactgggatcttttttttgagacagagtctctgttacacagagtgcagtggcacaatctcggtttactgcaacctccaactcccaaattcaagtgattctcatgcttcagcttcccgagtagctggaattacaggcgtttgccaccacgcctggctaatttttgtatttttagtaaagacagggtttcaccatgttggccaggctggtctcgaactcctggcctcaagcaatccacctgccttggcctcccaaagccctgggattacaggtgcgagccaccacacccagcccagatggggacctctgaataaagggagggtaagaaaataattttcagcatctactggtacagtgactcataaagatatgaggatcttgaacagcaacaaatgatttaaaaatggaatattctgtctctgagatctaaccttaggatcacattggtcttctttgaatctaagaataatatctaaagtgtttttggcaacctgtccaggaggcaacaaatatatatctcatgttttctacaggacaaactgtgaaagagatacatgtgaagcccagaagcatcacagaatcagcttcctatccaaccctcaggaatttgacaattacaagaactttggtaaagtccagaaagcccaggacattactgtagtccataagtaactaagctgagggaaagaatggaatttggggtggggttaggaaacctgagttatgtccctagttaggcccctgattaactgtgtgataatcaccagtcacttcctggttcagtgtttcagtcccttcccctgcccaagtaaaataaaataatgattttattcttttttttgagaaaggtaagcatgattgtttctatagagaaatctggaaagtagccaatctcttagtgtagctctatgggatgattttggtcattttataagcaatgtaacctgtaaacctcctggttgttgttgggaccctcagaagggaatgagataaataggtagtctgctttcctcctgcgtcttctgtctaggatgatactgttgtgttgctaacagagggccctggagagagatttaggagataactgggtaccacccaactaggtcagggaatgagtcagggctcaaggactcgataccaacctctcccactcctgccaggaaacctctgggtgagacagatgagagagaagccgaggggcgggcctcacggctgcctgccctgggtcctctggcttgtggtttcaccctggtttgccctgcagcagctgtaacgtgtctgctgacacgcaagccctggacacggctgtccctccccctttcccaaacttctgctcagtttcagaaacagatggcacattccaccccagaagtgactgttggagagatgagaggaaaagggcagagcagagctaggtggagatgtgacacttcagaaagcacagggcaaaacaccgtacatgagacttttcatccaggaggcgagtaggaagtagaaactaaactcacctccagagaaatcaggatgggaaaagggcagaacgacatggctgggctgttgcagatgatagaacacagctgaaggataaggctggggcatgccctgcagcgctagcctggaaacctgcaagccttaagagcaaaatgacaaaaggtcacgtctcttgtttggaggtactcagtgcctgcaaatccatctttctctcctcaacatctcaattcccagtttataataggccagtgcaaaaacggttttaggcacctacaatctaccgagttacctgtttccatatatgattttacttacgttcacaacccctctatgaggtaagttctctgcatttcagtgtacccatctgcgaaattatctccattccacagatgggtttgcactgaaatgcagatgacttaagtaattggctaataaagtttggaaatagtggagcaagatctacatcagttgccagagcccccacgaatttcattatgccaagttttctttgatttgaagtaatcaaaatgaagaaagcaaaatgatgtccaaatagtagagacttcttaaaagcttttcaaggggccgggcgcagtggctcacgcctgtaatcccagaactttgggaggttgaggcagacggatcacctgaggtcagaagttcgagaccagcctcaacatggggaaaccccgtctctactaaaaatacaaaattagccgggcgtagtggtgcatgcctgtaatctcagctacttgggaggctgaggcaggagaattgcttgaacctgggaggccgaggttgcggtgagccgagatcgagccattgcacactagcctgtgcaacaagagtgaaactccgttctcaaaaaaaaaaaaaaaaaaaaaagccttttttgagacggagtctcgctctgtcgcccaggctggagtgcagcggcgcgatttcggctcactgcaagctccgcctcctgggttcacgccattctctcgcctcaccctcccgagtagctgggactacaggcgcccgcgaccaagcccggctaattttttgtttttgtatttttagtagagacggggattcaccacgttagccaggatggtctcaatctcctgacctcgtgatccgcccgccttggcctcccaaagtgctgggattacaggcgtgagccaccgcgcccggctgagcaatttttttaaattaattttttttatttcaatagcttttggggtacaagtggttttgattacatggatgatttgtatagtggtaaagtctgcgattttaatacaccagccactcaagtagtgtacactgtacccaatatgtagtttttttatctctcgcccacctcccaccggtagtgaggaattaatggagatccctgaatctctcaacataggtatttaaacatccaggaattgggtttacataggcctccctgcagtctgagatccggtgcagccttggtaccctctagtggaagttttctgcattcgcacagcttccctgtttccaatcccaaagagctgagaaggaagccttcacccagccacaggagagcatcccaaaagaatggtcagctggaagatagatttttttgtttttgtttttgtttttgtttttgagatggagtcttgctctgttgcccaggctggagtgcaatggcacgatcttggctcactgcaacctccgcctcccaggttcaagcaattctcctgcctcaacctttcaaatagctgggactacagatgcacgccgccatgcccggctaattttttgtattttagtagagatacggtttcatcatgttgcccaggctggtcttgaactcctgagctcaggcaatccacctgcctcggcctcccaaagtgctgggattacagacgtgagccaccgtgcccgcccggaaggtagatttttgtatagcagggtcatgcagggtagaggaaggaatacagactagagaaaatgtgtgccaagcacttggttcacaagggacccccaaaatgagtcactgttagtatataaatgagcttaggactttgtacattattaataggggctcaatatacataacacaggactgtaggcctttagggctctagagggagactttttttgagacggagtatcgctctgtcgcccaggttggagtgcagtggcatgatctcggttcactgcaacctccacctcccgggttcaagtgattctcctgcctcagcctcctgagtagctgggactataggcacatgccaccacgcccagctgtatttttagtagagacggggtttcaccatctttaccaggctggtctcaaactcctgacctcgtgatccacccgccttggcctcccaaagtgctgggattacaggtgtgagccactgtgcccggctgagactttttttttttaatggagaaaattagtgatcagagaacaaactgactttgggcaaagcaatttgccaaaggccaaagggcaaatcaatgtcggcaatggtggtactagaatccatatctcctgtctcccaatccagaggtgtttccactctatcgcacttccttatttgttggttgattgattttagccataaattggtgtgcatacaaggacataaaggttgtaggtataacaaggatattgtttctgccttcatctgcccacaatccatacatttttcattctttcatccaatgggcacatttatagagtgcctattcttgccacactaggcattgcttttcaagtttgtggacccttttacagggtactccagcatatgagaagaagttcccaggctactggaaccccatgcctacagccctccaaggcactcctggagcttctttcccaagtttctagcactaaattgttaggtttatttctgtctccctccccctggagaggtaatccctgggaatggaagtgggttagaaacagattactctgatccaagggctttgctctctcctccctaaacatggtgtgggaggtgggggatgtggggagttgaaaatagcctgaaattcccttttaggattattgcttgatttagctatctggggtgaaagtggagcaagaagaggtgagggattaattctagacctagcttgagcaatgggatgcatgggcttcttttctggctcagccaaggtgagcaagcaacatctcttccgaaacctgtctttagaataaggaatctagggcaaggaagcagaaagaggtaaaggaaaaggatttgtccccagcagcaggggtgagtggaaggatagatgggaaagaacagcagctaagagaagaaagaccttcagcacaggaataaggaatgacttttgggcttggaagctacctgcatttcagtggtcttagcttcaacaaaggcgagaactgctctctaggggaagagagctaacgctcagggcttcctgtggacttcttgttcatccatccaacaggaactctcttgctttaggcacgctgcactggggtggactctgggggcagggatgttatctgtgtccagcacaaagagcagttacactttccaggtttctgctaggctccttatatccctttcagggctatgatggggcttggaagcagtaattataactaaccagagtgggaccatatatgaattcactttatgagttaacaacaattctacttaaattctacttaataacccccttcctttcttacttttttttttctttgatacagagtcttgctcggtcgcccagactggagtgcaatggtgcgatctcggctcactgcaatctccacctcctgggttcaagggattctcctgcctcaacctcccgagtagctgggactacaggcacgtgccaccacagctggctaatttttgtattcttagtagagatggggtttcaccatgttggccaggctgttcttgaactcttgacctcgtgacccacccacctcagcctcccaaagtgctgggattacaggtgtgagccaccgtgcccagccccctactttttctttttttttttgagacggagtctcactctgtcgcccaggctggagtgcagtggcacgatctcagctcactgcaacctccaactcccaggttcaagcaattctcctgcctcagcctcctgagtagctggggctacaggcatgcaccaccacgcccagctaatttttgtatttttagtagaggcagggtttcaccatgttgtccaggatagtctcaatctcttgacctcgtgatctgcccgccttggcctcccaaagtgctgggattacaggcgtgagccactgcgcccggccaataaccccctttctataggtgaggaaaaaaggtgaagctaagatgtaaactcaggcactatagcattcttaaccactttcactatgtgaaagccatatacagtcaactcgagtgacaaacaagctctactaatattgcttgctaaagatcagctgaagccgagcgtggtggctcacacctgtaatcccaacactttgggatactgagaggggaggattgcttgagcccaggagattgagaccagcctgggcaaaatggcaagaccttgtctctacaaaaaaaaaaaaaaaaaaatgctggatatggtggcatgctcttgtagtcccagctactagggagactgaagcaagaggatcccttgagcccaggaatttgaggcagcagtgagctgtgatggtaccattgcaccccagcctggtgccaaagcgagaccccatctctaagtaactaactaattaactaaagctcagttgagaatatttcttagaaagtcaggatccttgtttcttctacagcaccttattttggacaattcacttattttgctctccatagtctcactttagggaagggaagtacaatataaatacatggcaagcctagtacttgctccaattctagtatcatattgtttagaattgggttcttcccagttctccagaagaattttcctggttcaaatcagctgtgcttctcctagaaagtaggtcactacgcagaatttctgaagtttccatctctgatgtcatctgccactgggaggggaaaaaatgtaagtgtgtgctccactgcttacataggaagagtctcattctctttggtctccatttattttatttatttattttttgagacagagtctcactctgtcacccaggctggaatacagtggcacaatcttggctcactgcagcctctgcctcccaggttcaaatgattctcatgcctcagcctcccaagaagctgggactacaggctcatgccaccacgcccagctgatttttgtaattttagtagagatggggtttcaccatgttggctaggctggtctcgaactcctggcctcaagcaatccgcctgcctcagcctccaaaagtgctgggattagaggtgtgagccaccacacccagccctcttcgggctccatttagaaatttcaatacgacaacaagggattccagtaacccacttcactgggaaaaacaggaaatcaacttttccttctgcctcattatatttctttttcttttcttttctttttttttttttttgagatggagtgtcgctttttcgcccaggctggagtgcagtggccagatctctgctcacttcaagctccgcctcctgggttcatgccattctcctgcctcagcctcctgagtagctgggactacaggcgcctgccaccgcgcccgactaattttttgtattttcagtagagatggggtttccgtgttagccaggatggtctcgatctcctgacctcgtgattcacccgcctcggcctcccaaagtgctgggattacaggcgtgagccaccgcgcccggcctgccccatcatatttcaactggaattcttcacatctgcttattgtataaataaatattggagtgtctactatgtgcaagagtgttctttgccaagactgagcccctaacaatcgattccttcctctacttgcacaatgagttctcttctcttgctcccatcatcgtgacaagatctttttatcttgctttttctgaaatgtgaattactaagattgtaggattaagaaataccctttttggctgggcacggtggctcatgcctgtaatcccagcactttaggaagatgaggcaggtggatcacctgaggtcaggagttcgacaccagcctgaccaacacggtgaaaccccatctttactaaaaatagaaaaaattagccaggcttggtggcgggcacctgtaatcccagctacttcggaggctgaggtaggagaatcacttgaacctggaggccgacgttgcagtgagccgagatcgtcccactgtacgccagcctgggcaacaaagtgaaacttcatctcaaaaaaaaaaagaaagaaaagaaatatccttttggtgttacttctctaacagacagctcccaattttcttcttttttttttttttttttttttttgggggggattgagttttgctcttgttgcccaggctagagtgcaatggcatgatctcggctcaccgcaacctccacctcccgggttcaagcaattctcctgcctcagccttccgaagagctgggattacaggcgcccgctaccacgcccagctaattttttgtatttttagtagagacggggtttctccatgttggtcaggctggtcttgagctcctgacctcaggtgatctgcctgcctcagcctcccgaagtgctgggattacacgcgtgagccactgtgcctggccagctcccaattttccatgaagctgatgaggtaggaagatatgaattttccaaaacagtagctcatcaaacaacaacaaaactaacttatagctcatctctaagcaattaaatgatattgactcccctatcattatttcatccaggctgatatggaacaagtttgtattaactgagaaactgatcagagggtgggcagagatgatctgggatgtgttggctactgtgtgaggctaacataaaactcaatggtggaggaagtaatctaagataaattatattaatgttctgcattaatcaataatcttggccaggcgcggtggctcacgcctgtaatcccagaactctgggaggccgaggcagatggatcacctgaggtcaggaattagagatcagcctggcgatgtggtgaaaccctatctctactaaaaatacaaaaattagccaggcatagtggcaggcacctgtaatcccagctactcgggggactgaggcaggagaatcgcttgaacccagggggcagaggtcgcagtgaactgagatcgagctattgcactccagcctggatgacagagtgaaactgcatctgaaaaaaaacaaaaaaacaaacaaaaaaaacacctctcatccatggagtaaactttcctcactttggttgggaataccagtaaaaataattcatgttttggccgggcacggtggctcacccctgtaatcccagcaatttgagaggccgaggtgggcggatcacctgaggtcaggagtttgagaccatcccggccaacatggtgaaaccccatctctactaaaaatacaaaaaattagctgggcgtggtggtgggcacctgtaatcccagttacttgggaggctgaggcaggagaatcacttgaacccgagagatggaggttgcagcgagccaagattgcgctatcgcattccatcctggctgacgagtgaaaactgtctcaagagaaaaaaaaaatcatgttttattttctagggattagagtaggtggacaggagtctgttaaataatcagatatagcttatttaaatgcttaataacatatattctatttttttcttttttcttgtttccctatgcttctataggcactgaatagctctgttgcccaggctggagtgcagtggtgggatcttggcttactgcaacctctgcctcctggacttaagccatcctcccacctcagcctccccagtagctggggccaccatgcccagctatttttttttttttttttttttgagacggagtcttgctctgtcgctcaggctggagttcagtggcacaatctcggctcactgcaagctccgcctcccaggttcactccattctcctgtctcagcctctggagtagctgggactacaggcgtctgccaccatgcccggctaattttttttgtatttttagtagagacggggtttcaccatgttagccaggatggtctcaatctcctgacctcgtgattcgcctgcctcggcctcccaaagtgcagggattacaggtgtgagccaccgcacccggcctaattttttaatttttttgtagagatagggttttgccatattgggcaggctggtcttgaactcctggactcaagggatctaacccacttccgcctctcaaagtgctgggattacaagtgtgagccaccccacacgaccccacatactcttcaacacatacatacagcactaatttcatgtcactattaatgtgtcgtgctataggttcaatactgtggctggaacttgtagggaaatacttaccacataagaatgtacgatatagctgcgaagtcaagctttaaaaaacgcctgtaatccttgcactttgggaggccgaggtgggcggattgccggagctcaggagttggagaccagcctgggcaacacggtgaaacctcgtctctactaaactagaaaaaattagccgggcatggcagcgtgcacctgtaatcccagttactctggcggctgaggcaggagaatcgcttgaacctgggaggcagaggttgcagtgagccgagattgtgccaccgcactccagcctgggtgacagagtgagactccgtctccaaaaacaacaacaacacgtgatctccaaacccaaaagtaatctttcagttcttctgatagtccccagcactttgcttcgacctttgtagcaattctacttcagcctgaaatttcttgtatgtacagcctgtagctcctaacttattgcaaaatattgtagatgagaactctgtaagctgtaattggcagaataataaccaacggctaagtgtggaaagtgtctgcctttcagcaacgtttacactactgaatttaccagggtgatcccaacatcacgaatcctttaacaacttaacatgaagcagcacgtagcagttacctgcatgggttctggaattagactgcttagattcaaatctcggttctgccagttatcatctatctaaccttaagtaaattacgtaattgctctgtgactcctttccgaaatgacaaatcacaaatgtttttgtcaattcacgtgtcttctgctttagtaaacatagtagaagacagtagtcaatctctttttttgtttttttttgagacaaagtctttctctgtcaccgacgctggagtgcagtggcgggatctcggatcactgcagcctccgcctcctgtgttcgagggattctcctgccttagcctcccaagtagctcagactacagccgcctgccaccaagcccggcgctctcttgctggcgcatgacaaccgtgcgttccaccctacgactaattttttttttttttttttagacggagtctagctctggctggagtcagtggcgcgatctcggctcactgcaacctctgcctcctgggttcaagcgattctcctgcctcagccttacaagcagctgggactacaggcgtgtgccaccacgcccggctaatttttgtatttttagtagagacggggtttcgtcattttggccaggctggtctcgaactcctgacttcaggtgatccaccggtctcggcctcccaaagtgctgggattacaggcgtgagccaccgcgcccggcctccttttccttttttaactaatggaataaacggcaatgtgccaagcatacagcaatgcccattccccggccttcagaaagcctcgggcgcaggcgcagctcgcgttcaagcgctctctcgctggcgggggacaacagttcgttccaccctacgcccaacgttgtctccctgcgcacgcgcggccgtactccgccctccttactccaccctcccccactcccgcgagcacgtgcgcgtcctcgctgctcacatttcggcggagggcgcgctccctggaaaattccactcctgtgctagctccaccctatgcggcttttctcctacccgacgctcttcactctcagctcccttcccggcggcctttgcgggaacaagatggcagcccccatacctcaagggttctcttgtttatcgaggtttttgggctggtggtctcggcaggtgggtagggacggggccgataggaccctaggggctacaggagaggacagagtcgagggaaatactctctgtgcaattgtccttggtgagctgggacaatacgagtcatacctaggccggggaagaggcttaggtggacaggacctagctgcggagctcagtggtcgaatggggatagcctagacagggccatgagagcgagtgaattaacggatattaagtttttccggattggtttgggtctgtctggcgaggagatattaaaggagagacaagtaatgggttggaaggtggactccctaatcttcgattcttataagtgaactacgttgaagagtagccgaaaatgagggcgtcccatattgtcactgccccgtctgagcaaacctcatgatcagagagaaaagatctcctgatctttcgagggtttattggtcagttgggtgctaaaacgacagaataaagtttacagcgagactcccgataggatgagcaaaatatcacgagtacatatggagcagatgcctacaagaggactttgcttatgctttaagcatagcattcagggcccggcgcggtggttcacacttgtaatcccagcactttgaaagtccgaggcagaaggatggcttgagcccaggagttcgaaatgagcctgggcaacatataagacctggtctttacaaaaaaattttaaaattagccagatgcgatggcgcactccttagtcccagctacttgggaggctgcggtgggaggatagctagagcccaggaggtcaaggctgcagtgaaccgtgatcgtgccatcgcactctaggctagcgatctgcctcaaaaaataataaagaatagtattctgcccatttcagtattgagttggtgtttccccatcaccatcagtttttgaaacttgctttgatcaactcagtatccgtaggagttagcatagtcctgtactgtgggaagttctaaaggaaagcctttagtaaatgtgatgttaataaaggttgctaactgtcttctatttagagacacccataagtattaaggtcctaatgcattttttccctgtgatattgttttataattgttcctgaagcattctttggatattccctctctatagtgctttgcttagagtttgtaaaagatagtagatcttttttctaggttcctaacctttcctttaccttccagccagttctggtgactcagtccgcagctatagttccagtaagaactaaaaaacgtttcacacctcctatttatcaacctaaatttaaaacagaaaaggagtttatgcaacatgcccggaaagcaggattggttattcctccagaaaaatcggaccgttccatacatctggcctgtacaggtgaggtatttctgggaccctgacctgggatccttctgtcagagatcttctggaacttgggatgacttggactatgattgataatatttaattaagcacgaagtcagttcaacctcaataatgattaaccttatatacactatatatcatgaagttgttctttgaacttactttcacactgtccctagaaggcaagagtgaaatttctccattttgtggaagtagaaactgaggctctgagagaagacttaaatctttctggctttttttgttttgttttgttttgttttttgagacagagtctcgttctgtcgcccagtggcacaatctgggctcactgcaacctctgcccccctgggttcaagcgattctcctacctcagccttccaagtagctgggattacaggcacctgccaccatgcccggctaatttttgtatttttagtagagatggggtttcaccatcttggccaggctggtcttgaattcctgactttgtgatccgcccgcctcggcctcccaaagtactgggattacaggtgtgagccactgtgcccggccttgttttgtttttttctagtgtaacatagttctctctacatggaagtctgtttcattagtctacttcatatccacaatccttcccaattttacattacttcaattttatgagtttttctcaatctttcaacactttcttaatttttttcttcctttattacagctggtatatttgatgcctatgttcctcctgagggtgatgcacgcatatcatctctttcaaaggagggactgatagagagaactgaacgaatgaagaagactatggcatcacaagtgtcgtaggtgtctgagacaattgggtattggtattagaataacaattttttgttgctactttatcccaaagagacctttttgggttaattgggttgggtgtcattctcttaataacatgatggtattttctcctttgtactagagtctgtatttaatgcagaataatgtgggcttcctgattctcagcatccctgcctttattggtaatttttgtcatatcagttagggagttgactttggagtgtataggatccttttttaatcatatatttaatttttttttttttgagatggagtttcgctcttgttgcccagactagaatgcaatggcacgatcttggctcaccgcaacctccgcctcctggattcaaatgatcctcctgcctcagcctcctgagtagctgggattacaggcatgtgccaccatgcccggctaattttgtatttttagtagagatgtggtttctccatgttggtctgttggtcaggctggtcttgaactcctgacctcaggaggcccgccttggcctcccaaagtgctgggattacaggtgagagccaccacgcccagccctttatttatttatttatttatttattttgagacggagtttcactcttaactcactgcaacctctgcctcccgggttcaagagattctcctgcctcagcctcccgagtagctggactacagacgcatgccaccacgcccagctaatttttgtatttttagtaaagacggggtttcaccatgttggccaagatggtctcgatctcttgacctcgtgatccacccacctcagcctcctgaagtgctgggattacaggcgtgagccactgcgcccagccgacctggctaatttttaaaagaaatttttgtagagacgggttatcactatgttgcccaggctggtctcgaactcctgggctcaagcagtcctcccacctcagcctcccaaaattctgggattacaggtgtgacccgtcacacccagccagtctagctctgactgtatctatctttttttttaaatttgtactgttcattgcagagcagggctaccccataggccactgtgcccagagtagccgctgtcactatatgtaaatcatgtataggtttatgtgcataagtatattgagtcagtatgaattcttcacatggccatgacttatttctctacatatagattttattggctgggtgcggtggctcacgtctgtaatcccagcactttgggaggctgaggtgggcggatcacctgaggtcaggaatcgaaaaccagcccgaccaacatggagaaacctcatctctactaaaaatgcaaaattagccgggcgtggtggcacatgcctgtaatcccagctactcaggaggctgaggcaggagaatcgcttgaacccgggaggcggaggttgcggtgagccgagatcgtgccattgcactccagcctgggcaacaagggcgaaactctgtctcaaaaaaaaataataataaaaaagattttatcatattacctccctgcttagaactcttttatggcttcctgttaaccaaagaataaaatccagatatcttcagtggtatacaaagcttttataatctggtccttgcctttttctccaccatcattctttgtccttattccatttttctcatcctaaattttagcatttccaaactaattgccaattccttgccagtactgtaccattcctctttgtctttgcacatcctttcctttgcctgaaatgtctttttcccctcctactttttttttcttctttttttgagatggagttttactcttgttgcccaggctggagtgcagtggtgcaatctcggctcaccacaacctctgccttctgggttgaagcgattctcctgcctcagctcccgagtagctgggattacaggcatgtgccaccacgtctggctaattttgtatttttaatagagatggggtttctccatgttggtcaggctggtcttgaactcccgacctcaggtgatccgccagactcaggcctcccaaagtgctgggattacaggcgtgagccaccacgctgggctatcatgtttgtttctaaggcctccatgactatttttggtgctgcctttgctgtgattgtaattgcacacttgtatttatttctcctaatactctgtactgcaatgtttcctctcatgtatttctctcctggactgtgagcagggtccatggtgatgatgaacaaagcacatacggttttaccatgcagttctcttctaggggaggaaaacagtcattaaatactgatcgcacacaaataattataggtgtagtgaagtaggagtgccatgggagcatatgacagggaaagataatggccgggcgaggtggctcacgcctgtaatcccagcgctttgggatgacgaggcgggtggatcacgaggtcaggagatcgagaccatcctggctaacacagggaaaccccgtctctactaaaaatacaaaaaattagccaggtgcggtggtgggcgcctgtagtcccagctactcaggaggctgaggccggagaatggtgtgaactcaggaggcagagcttgcagtgagccgagattgcaccactgcactccagcctgggcgacagagcaagactccgtctcaaaaaaaaaaaaaaaaaaaaagataacttggtctgggagatcagagaagacttgcctgaggaaatgatatttaaagttgggattgtggctggatgaggtggctcacaactgtaatcccagcactttgggaagccaaggctggtggatcacctgagaggtcgggagttcgagaccagcctggccaacatggtgagatcccatctctactaaagatacaaaatttagccaagcatggtggcacatacctgtaatctcagctactcggaaggctgaggcaggagaatcggttgaacccaggaggtggaggttgcagtgagcccagattgcaccactgcattccagcctgggcaacagagtgagactccatctcaaaaaaaaaaaaaaaaaaagtttgttttttttttttttttttagagttagccaggtggagaagtgtggtgaggaatagcattctagggaaacagaacagtacaagcaaggctttgaggttaaaagagtataaaggggtgtcagattttgtcaaatgcttttttgtgtctattgagatgatcatgtgatacttgttctttattctgttgatatgatgacatattaattgattttcttttcttttcttctttttttttgagatggagtcttgctctgttacccaggctggagtgcagtggctccatctcggcccactgcagcctctgcctcccaggttcaagtgattctcctgcctcagcctcccgagtagctgagactacaggtgtgcgccaccatgccccactgatttttgtatttttagtagagacagggtttcaccatgttagccagcctggactcctgacctcaggtgatccaccttcctgacctcccaaagtgctggcattacaggcgtgaggcaccgtgcccagccttattaattgattttcaaatattaaaccaacctcacatccctgggataaattcctttaacacacttaaattaatactttgattaaatcaaattctctatattgttataacttggaaaatgctgttgacagctgagttatatagtacattatgaacactttttctttcctgcataatatatttttttttcctgaagtgtagtgtcttaatttgctcatttgcttatggaactatgggttatgtaatttcctctctgtgcattcaaaacattaaatttttttttttttttttttttttttgagagggagtctcactctgttgcccaggctggagtgcaatggtatgatcttggctcactgcaacctctgcctcctgggttcaagcaattcttctgtgttagcctccccagtaggtgggactacaggtgtgtgccaccacacctggctgttttgtatttttagtacagacggggtttcaccatattggccaggctggtctcgaactcctgacctcattatctacctgcctcagcctcccaaagtgctaggattacaggtgtgagccaccacgccctgcaacattaaatattttattaatttcatctttttcaagaaatccctcctggagtcttcttacctgttttaatctggactagttgctcttaaggccaactgtacgtcttaggatctaagattcctcttgcctccgtcttcttttcttttttttttgagactgagtcttgctctgttgcccaggctggagtgcagtggtgcgatctcagctcactgcaacttccgcctcccgggttcaagcgattctcctgcctcagtctcctgagtagctgggattacaggtgtgcgccaccacgcccagctaatttttgtatttttagtagaaatggggtttcaccatgttggtcaggctgattgcctccctcttacgttgtattccctgttgcttggatcctatgtctttatgttttcatagtctatttcattactttggtggagcacattttctagcagctgcctgagaaaggctgcatggtggataaataagatcttgcaagtctaaaaagaaatattttattctcccacttcatttataatttgcccaggtatttaattctgtgatagaaataattttttcctcaattaaaagtactgctcaaagtctgggcatggtgggtcatgcctgtaatctcaacactttgggaggctgaggcaggaggatcacttgagcaggagttgaataccagctgggcaacacagtgagaccttgtctctacaaaaactaaaaaaaagtgaaaattagccaagcgtggtagtgcacacctgcagttccagttacttgggagtctgaagtgggaggattgcatgagtcccagaggtcaaggctgcagtgagccctgatggcgtcactgtactctagcctgggtgacagagtgagaccctgtctcagtgaatgaatgaatgaatgagtgaatgaataataaaagcactgctctgttgtctttgtaattactttttattttattttttttttgagacggagtctcactctttcgcccaggctggattgcagtggcgcgatcttgacttactacaacctctgcctcttgggttcaaacaattttcctgcctcagtctcctgagtagctgggactacgggcgcctgccaccacgcccagctaatttttgtatttttagtaaagacagggtttcaccatattggccaggccagtctcgaactcctgaccttgtgatcagcccaccttggcctcccaaagtgctgggattacagacctgagtcactgcgcccggccgtaacttccttttttttttttttgagacgaagtctcgctctgtcacccaggctggagtgcagtggcaggatctcagctcactgcaacctctgcctcctgggttcaagtgattcttctgcctcagtctcccgagtagctggaactacaggcacgtgccatcacgcttggctaattttttgtattttagtggagacggggtttcaccatgttggccaggatgatctcgagctcctgacctcatgatctgcctgctttggcctcccaaagtgctgggattacaggcgtgagccactgcacccggcctgtctttgtaacttctaatgttgctgttaggaagcccagtgttgccaggtgccatggctcaggcctgtaatcccagcactttgggaggccgaggcaggcagatcacaaggacaggagttcgagaccagcctggtcagcatggtgaaaccccatctctactaaaaatacaaaaattaggcgggcggggtgatgtgtgcctgtagtcccagctacttgggaggctgaggcaggagaattgcttgaacccaggaggcagaggttgcagtgagccgagattgcgccactgtactccagcctgtgcgacggagtgcgagactctgtctcaaaaaaaaaaaaaaagaagcccagtgttattctgactcttttttttgagatggagtctcgctctgtttcccaggctggagtgcagtggcgcgatcactacctctgcctcctaagttcaagtattctcctgcctcagcctcccaagtagctgggattacagacagcaccaccatgcccagcttttttttttttgagatggagtctcgctctgtgacccaggctggaatgcggtggtgcgatctctgctcactgcaacctctgcctcctgggttcaagcgattcttgtgcctcagcctccggagtagctgggattactggtgtgcaccaccatgcccagcttatttttggatttttagtatagatggggtttcaccctgttggctaggctggtctcaaactcctgacctcaagtgatctacctgcctcggcctcccaaagtgctgggattacagacgtgagccaccgcgcctggcctattttgactcttgagcatttgtaagaaacccgttttttctgtttttagtgcatatcagatgttatctttgattctagaattctgaaatttcactatgagaagtcttagtctttctttagagtgcttaatttaagagggagaaggttgaatttccaggacttgacacattaaaaaatcaattattggccgggcgtggtagctcacgcctgtaatcccaggactttgggaggccgaggcgggcggatcctgaggtcaggagatcgagaccatcctggctaacacggtgaaaccccgtctctactaaaaatacaaaaatttagccgcgtgtggtcgcgggcgcctgtagtgccagctactcaggaggctgaggcaggagaatggcgtgaacctgggaggcagagcttgcagtgagccgagatcatgccactgcactccagcctgggtgacagagcgagactcaaaaaaagaaaaaaaaaaaaaagctaaacagttattgagtaagtggatggacatgaatggaggtcagtgtaggctgtgaattatggaattgtaagacctttagaagtaatactcaggcttaattttacagaatccggaggataaaagactatgatgccaactttaaaataaaggacttccctgaaaaagctaaggatatctttattgaagctcacctttgtctaaataagtaagtgaactccctatctttacccattctgttctcagcagttagctattattttaggcacagtttttttgtttgtttgtttttgttttgcacaaatttgttttctgccttcaggtaagagatctagagtgagagaacttcctatattggaagtaattagtgactgacgctgtctttcactcccctctctgcttctgggaatttctaccatttggtctgtctcagttccacctgcaagtgttgggaccttgtgccagaatagctgcctttttcaccctatctgatccctgaattcattctgatcttttttgtgtgtttgtcttacgtatcttcatttccctttccttggttattttgaatatatttcttgtgaaaatttccagctctccctccacttttatttttttattttttattttgagatggagtctcgctctgtcgcccaggctgggagtgcaatggcgcaatcttggctctctgcaacctccacgtccctggttcaagcaactcccctgcctcagcctcccaagtagctgggattacaggtgcacgccaccacatccagctaatttttttgtatttttagtagagacggggtttcatcatgttggccagactggtcctgaactcctgacctcaggcaacctgcccgcctcggcctcccaaagtgctaggattacaggcatgagccaccacgcccggccccctttttttttttgagatggagtctcactgttgcacagtctggaatgcagtggcatgatcgtggctcactgcagccttgacctcctggacccaagtggttctctcaaggaatctacttagtccgtcaagtagagctgggaccaccagcatctgccaccacacccagctaattaaaataaacttttttttgtagagacaaggttttgctgtgttgcctagactggtctcaaattcctgggctcaagcaatcctcctgccttggcctcccaaagtgaagaaattataggcatgagccaccatacctggccacccagctttttcttgattcatccaagttagggctcctaggaagatgaagaatcaacattaggaggctggaatatcttaagtactagccgtggactgttgctggcattctttgatctgtggctgctgtggctaggcttcaggtgggacccaaaacctgtagtctaaaatccattaattatttaattttacttttatttctttaaaaaaaatttatttattttgaatagagatgggatgtcgtgatgttgcccaggctgttcttgtttttgttttttgttttgagacggtcttgttctgttgcccaggctggagggcagtggtgcaatcacagctcattgcagcctcagctccggggctcaagcgatcctcccatctcagccccctgagtagctggaacctctaggggtataccaccacaccctgctagttttcatattttttgtagggatgggatttcaccatgttgcccaggctatgcaagccagtcatttttttttttccccctttttgagacggagtctagctctgtcatccaggctggagtgcagtggtgcagcctgtgcctcctgggttcaagcaattctcctgccttagcctcccaagtaactgcatgccaccacacccagctaatttttgtatgtttagtacagatgggtttttaccatgttggccaggtggtctaaaactcctgacctcaggtgatctgcctacctcagcctcccaaagtgctgggattacagatgtgagccactatgctcagccttgttttatttctcaaaacattgtttttttttttgtttgtttgtttgttttgagatagactcttgctctgttgcccaggctggagtgcagtgacgtgatcttggctcactgcaacctctgcctcccagattcaagcaattctcctgccttaacctcccaagtaactgggattacaggcacgcaccaccacacctgactattttctgtatttttaatagagacggatttcaccatgttggccaggctggtcttgaactcctgacctcaagtgatccgcccacctcggcctcccaaagtgctgggattacaggcgtgagccaacgcgcccggcctaatttttgtatttttagtagagatggggttttgccatgttggctaggctggtctcaaactcctgacctcaggtgatccgccctcctcagcgttactgttgtttctgttgagaaattaacttttttttttttcattttgttaaagtttatttttactttgtgtgcttttatttatgttttttttttgagacagagtctcgctctgtcaccaggctggagtgcagtagcgcaatctcgacttactgcaacctccgcctcccagtttgaaacgattctgctgcctcagcctcttgagtagctggaactacaggtgcctgccaccacgcccagctaatttttgtatttttagtagagacagggtttcaccatattggccaggctggtctcgaactcctgaccttgtgatctgcccaccttggcctcccaaagtgctgggattacaggtgtgagccactgtgcccagctgactttgtgtgctttgaagattttctctcaggctgggtgtggtggctctcgcttgtaatcccagcgctttgggaggccaagactggtggatcacaaggtcaggagttcgaaaccagcctggccaatgtggtgaaaccctgtctctactaaaaatacaaaaaaaaaattagccaggtgtggtggtgcatgtgtgtaatctctgctacttgggaggggctgaggcaggagaatcgcttgaacccaggagtcagaggttgctttgagccgagatcgtgcagctgcactcaagccacgacaacagagcaaaactccgtctcagaaaaaaaaaaaaaaaaaagattttttttctttctttttagtattcagcaatttactatgatttatctatgggtatctgtcttcttaaatttttatttttattttttagttttttttgtagagacagggtctggccttgttgcccaggctggtcttgaatccctggcttcaagcaatccttccacctcagactcccaaaatgctgggattataggcatgtgccaccacactgggccatgtgtgtgtcttttatcctgctctgggttcatattgcttcttaaatctttaggtgctttttttgtcagtgttggaaaattctcagtcagaactcatctcttcagatgttgcttctgctccactttctcgtctccttgtgtagttctgaatacacatatgttagatctttcactgtgtgccaaatgtgtcttcagctcttttctatatttttccaacctttttttttccccctccagctttagtctggatattctctgatctatcttcctgtcctcttttcagttgtagctaatctgctgttaacctacctatcgagttcttaattttatatttattttatttattttctgtttttcgcttttagaattttcttttttttttttttttagtgtgtccagatctctggtaaaattctccattctgtcatctaatttcttgaacatgctaatcacagttattttaaaacctgtgtctgataacttcaaaatctatgtcttcaataggtccattttctcttgtcttatttgtttcttttgggttttggttagttcttgtcatttttgtttttgtttttgttttttttttttgagatggagtcttgctctgtcaccctggctggagtgcagtggtgtgatctccgctcactgcatcctctgcctcccggattcaaggaattctcccttctcagtccctggagtagctgagactacaggtgcacaccatgatgcccagctaatttttgtatttttagtagaaatggcatttcaccatattggtcaggctggtctcgaactcctgacttcaggtgattcacctgcctcagcctcccaaagtgctgggattacaggcatgagccactgcacctggccttgtttttggtttttgagacaggctcttgcgctgtcactcaggctagagtacagtggctcgatcatggctcactgctgccttgacctcccaagctcaagtgatcctcccacttcagcctccaaagtagctgggacttagtacatgccaccatacctggctaatttttaaattttttgtagagacagggtcttgctatgttgcccaggctggtctcgaactctggcctcaagcagtcctctcagcctcccaaagtgttggtacagttttcttgccattttgtattcctgcatttttttttaaacaaatagatattttagaaaaatctaagacaatcatttattttaaaaattataagattaataatagcttttatatatttatggtaaaatacacataatatacaatttaccattttaatcattttgaagtatataattcagtggcattaagtacattcacaatgttgtacaattcttaccactatccatttccagattttgttcatctcagacaggaattttatacccattaagcagtaattccccattgccctcttcccttatcacctggtaacctccattctactttatttctctatgaatttacccatcctgatgctatggtctgaatgttagtgtctcctgaaaattcatttgtcaaaatcctaacccccaaggtgatggtataggctgtggggggccctctgggaggtgatgaggtcctgagagtggagccctcatgaatgggaagagtgcccttataaaggagacccggggatccaggtgtggtggttcacgcctataatcccagcactttgggaggctgaggcaggcagatcacgaggtcaagagatcgagaccatcctggccaacatggtgaaaccccatctctactaaaaatacaaaaattagctgggtgtggtggcgtgtacctgtagtcccggttacttgggaggctgaggcaagagaattgcttgaacccaggaggtggaggttgcagtgagccaagatcgcaccactgcactccagcctggcgacagagcgagactccgtctcaaaaaaaaaaaaaaaaaaaagagacctgagggagcttgtgcaccccttccacccactgacgacacagcaagaagtcaacatctatgaggaacgggctctcaccagacaccaaatttgccagtgtcttgatcttggacttcccagcctctagaactgtgagaaataaatgttgtttataagccacctggtttatgatatttttgttacagcatcctgaacagatgaaggcatctaggtacctcacataagtggaatcttacagtttttgaccttttgtgattggcttagttcacttagcatgatgtcttcaatgttcatatatattgtagcatgtgtctccttaattttatttttatttttttatcttttttttttttttgagatggagttttgctcttgtcacccaggctggagtgtaatggctcgatctccagtcactgcaacctttgcctcctgggttcaagcgattctccagcctcagcctcccaagtagctgggattacagacgcctgccatcacacctggctaatttttgtatttttagtagagacggggttcaccatgttggccaggctggtctcgaactcctgacctcaggtgatccgcctgcctcggcctccgtaagtgcggggattacaggtgtgagccaccgtgcccagccacgtatgtctccttattaaggctgaataatatttcattgtatgtatatacaccacattttgtttatccattcatctagtgatggacattcaggttgtttccaccttttattgtggcataatgctcctgtgattgttggtgtacaagtatctgtttgagctcgtgctttcaattcatttgggtatatactcagaactgaagttgttggatcacatgataactctatgtttaactttttgaaggtctgggtggtggctcatacccgtaatccagcacttttggaggccgaagtgggaggattgtttctgggcagcagagtaagaccccatctctataaaaaatttaaaaaatcatccgggcatggtggtgcatgcctgtagtcccagctatttgaggtgctaaggcagaaggattgcttgagctcagggatttttgaggctgtggtgagctatgattgtgtcactacactccagcctcaatgacagagtgagactgtctcaaaaaaaaaaccctaactttttgaggaaccaccatatggttttccttagcagctacactgttttacattcctatgaccaatgcacaaggattccagtttctctacatcctcactgatacctattactttcctttttattggttttttttttttttttttgagatggagtctcgctctgttgctcaggctggagtgcagtggcacaatcttggctcactgcaagctccgcctgccgggttcaagccattctcctgcctcagcctcccgggtagctggaactacaggcgcctgccaccacacccggctaattttttgtatttttagtagagatggggtttcatgtgttagccaggatggtctcaatctcctgacctcgtgatccacccgccttggcctcccaaagtgctgggattacaggcgtgagctattgcgcctagccactttcctttctattaaaaaaaaaaaaaaatatatatatatatatatatacatatatatatatacgtatatatatatatatatacgtatatatatatatatacatatatatatatatatatgagagatggggtctcactgtattgcccaagctggtctcaaactcctgggcttaagcaatcctcttgcctcggcctcccaaaatgctaggactacaggtgtgagccaccatgcccagcctttttctttttataataggcatcctcatgggtgtgaagtgtagtatctcattatggttttgctttgtatttccctaatagctagtgacattgagcatcttttcatgtgctattggccttttgtacgtcttctttgaagaaaggtcttttttttttttttgagttgaagtcttgctctgtcgcccagacaggactgcagtggcacgatctcggctcatagcaacctctgcctcctgggttcaagcgattctcctgcctcagcctcccgagtagctgggattacaggcatgcaccaccatgcccagctaatttttgtagttttagtagagacggggtttcaccatgttggccaggctggtctcgaactcctgacctcagatgatccacccacctcagccttccaaagtggtgggattacaggcgtgagccactgcacccagcccagaaaggtctatttttaaattaggcggttattttgttgttgagttataggagttctttatatattttggatattaatcctttatcagatatatgctgtgctaatatttccccccattttatggtttgtcttttcactcttttattattattagtttttgagatggagttttgctcttgaagcccaggctggagtgcaatggcgtgatctcggctcaccgcaacctctgcctcctgggttcaagcaattctcctgcctcagcctcctgagtagctcagattacaggcatgcgccaccatgcctggctaattttgtatttttagtagagacagggtttcaccatgttggacaggctggtcttgaattcccgacctcgggtgatccacctgcctcggcctcccaaagtgctgggattacaggcgtgagccactgcgcctgccgtcttttcactcttgatagtatcctttgatgcaaaaaagttttaaattttgatgaaatccagtttttcaagtttttttcttttgttaccatatcgagttttttcttttggtgtcatattcaagaaatcattgccaaatccagtgtcatgaagtatttccccttcctttttctctaagatttttatagttttagctctcacatttaggtctttgctccattttgagttagtttttgtatatagtgaaaactatgtgatgtttttgcttttttttgcatgagaatattcatttttctagcaccatttattgaagagactgtgctttcccattaagtggccaggccggtctcaaactcctgacctcagatgatccacccgccttgacctcccaaagcgttgggattacaggcatgggccaccgcctgtcctcaacagtggtttttgcagaaatagagaaacacagccaggcgtggtggctagttcaacctagtttgaataatatcaacttagtttcaataatatacaaacgctctgctcctatatgtctctccctcccacttcattatgtctctcctgcttcattatcacagattacagttttataccttgggtgcccattacatcaattcataattattgttttatgcatttgccttttaaatcatacaggatgaaaaatgaggaattataaaccaaaagtacagtaatacaggcttttatatttatctatgtagttacttttcctacatagtagtaaaacatacatgttttttgtttttttcttgtggttttgagttactttctggtgtcctttcattttagcctgaaggatcccctttagcctttgtttgtttcttttttattttaaagtcagggtctcactttttcagccaggctggagtgagcacagtggtgcaatgatagctgcactgcagcctcaacctgctgggctcaagcgatcttcccacctcagcccctgagtagctgggactacaggtgtgtgccacagcacctggctaattttttttttttttttctaatttttttgtagagacaggggtctcgctttgttgcccaggctggtctcgaactcctggcctcaagtgatcctcttgcctctgcctcccaatgtgttgggattataggcatgagctgctgtgcccagcctattgccactttcaagattcattctttgtgtttgggttttgacactttggttttaatgtttcttggtatgaatttctttcagtttatcttgctaggaggtttttgagcttcctggatgtacatatgaatgtctttcatcagatttgggatgtctgcagccattatttctttttctttctttttttttttttgcatgttatttttattttattttattttttgagatggagctttactcttgtttcccaggctggagtgcagtggcccgatctcggctcattgcagcctccgcctcccaggttcaagtgattctcctgcctcagtctcccaagtagctgggattacaggcacttgccacccacacctggctaatttttgtattttttagtaaagatagggtttcaccctgttgaccaggctggtctcgaactcctgacctcaggtgatccacccaccttggcctcccaaagtgctgggattacaggtatgagccattgtgcctggccgcattatttcttcaaattttttttctatccatttctttcttctttttctgggactcctatgatgtgtatttggtatacttgatgatgtcccacaggtccctcaaggttttgttcattttttttccattattttttctctttgcattttagactatgtaattttaattaccttatcctcaagttcactgatactttgcctgctcaaacctgctgttgaacccctctagtgaattttaaaatttattgtactttttagctccagaatttctgtttggttcccttgtataatttctgtctccaatgtgttcacacattgtttttctgatttcattacttctttgtccatggtttcctttagctcattggacatatttaggacaattgatttgtgtctttactaataattacaatgtctgggtttccttaggggtggtttctgtcaaattattttttggtcaggtgtggtggctcatgcctataatccagtactttgggaggccgaggcgggcagatcacttgagtccaggagttcgagaccagcctggccaacatggtgaaaccccaactctactaaaaatacaaaaaaagctgggtgtggtggcgtgcacctgtagtcccagaatctcactctgtagcccaggctggagggcagtggtgcaatccaaaaaaaaaaaaaaaaaaaaaaaaaaagcaaaagtgtatttgtctgttttacattttatccaacatttcctttttttttgagacggagtcttgctctgttgccaggctggagtgcagtggcgcgatcttggctcactgcaacctccacctcccaggttcaagcgattctcctgcctcagcctcctgaatagctgagactccaggtgtgtgccactgtacctggctaatttttgtatttttagtagggacagggtttcaccatgttggccaggatggtcttgatctcctgacctcgtgatctgcccaccttggcctcccaaagtgctgggattacaggcatgagccaccgcacccggcccataaatccaccatttctaaatgtttatagtagaagtagtattacattattgcaaaatagtaagtgaactcatggaaaatggagtttatttccactgaagacttctatgccaggatagtggggaggaagagttcactcagaggtgccagtgatggtcatcatggtagttgtcaccacagctcagtctgttcctacagtagaggaaatgacttggaatctttcctattaggaatagagatgaaagggaagcagatagacatgttagaactaatcccttacccattctgggcttagagagcaagatttttcaaaggggacaaagagttaaactgctcatagtaaactggggaaaagtcgtgtgtatctgaaagaagctaatctatggccttaggtttgagactcatcagctaggaaccctcctaaaatcttgtatctataggagctagggtttgttgtctgttttgtgttttttttgttttgttttgtttttttttgagacggaatctcgctctgtcactcaggctagagtgcagtggcgtgatctcagctcaccgcaacctccgcctcccgggttcatgccattctcctgccttagcctcctgagtagctgggactacaggcgcctgctactactctcggctaattttttttgtatttttagtagagatggggtttcaccttgttagccatgacggtctcgatctcctgacctcatgatccacccgcctcggcctcccaaaatgctgggattacaggcatgagccaccatgcccggctgttttgtgtttttttaaccattactatatagagtcagcatgactcggccactctggcagcaacaagataaaggagagaaaatagaccaggaaagacatgattatctttgactaggttcaaagatgagcgtgtaagatataaggctaaaaacatggtgaaaccccatctctactaaaaatacaaaaattaggtgggcgtcatgacgtgcacttgtagtcccagctactcaggaggctgaggcaggagaaccgcttgaacctgggaggtggaggttgcagtgagccgagatcgcgccactgcactccagcctggcgacagagcgagactctgtctcaaaaaaaaaaaaaaaaaaaaaaagatataaggccaagccagatggtactgatgctggctcagaggcaagaggagataaaacaagcttttgattgttacttgtgttgaactttgttgctcataccagcttagagcaaaaatcaggtcctatgtcccagtgagggtacccatcttaaggatatatggtaattttagagaaattgcctcctactccttagatttaaacataattttttttaaatttattttttatttgtaatataattttattctgctactagatcttagggttttctggtaaatcacattattgttcgtgtttgtgcccctagaatttagcatattttatacctggcttatactagatgtgccgaaaacatttgtaaaaatgaattgttttccattttcaggaccattttcagtcttcatacagggtattataagagcaatagtcaatgatatttattgctttcttttctagctcagaccatgaccggcttcataccttggtaactgaacactgttttccagtaagttctcatcctccttagaactgtggggtgactgagtgggcagattctagatggcgtctctggtttttcttttcttttcttttcttttctttttttttttttttttgagacagagtttcactcttgttgcccaggctggagtgcaatggtgcgatcttggctcaccgcaacctccacctcccaggttcaagcgattctcctgcctcatcctcccaagtagctgggattacaggcatgcgccaccatgcccagctaattttttatttatttatttatttatttatttatttatttatttatttatttatttattttgagatggagtctcgctctgtcgcccaggatggagtgcagtggcgctatctcggctcactgcaagctccgcctcccgggttcacgccattctcctgcctcagcctcttgagtagctgggactacaggcacccgccagcacacccggctaattttttgtatttttagtagagacggggtttcactgtgttagccaggatggtctcgatcttctgacctcgtgatccggccacctcggcttcccaaagtgctgggattacaggtgtgagctaccgcacctggcctaattttgtatttttagtagagacggggtttctcccgttggtcaggctggtctccaactcccgacctcaggtgatccgcccgcctcggcctcccaaagtgctgggattacaggcatgaaccccactgcgccctgcctggtttttcttaagaaggatcagttttgagagtgtaggaagtttaaggcacaggctgaaggttcattgcttgtagctgaatgacaatgtcttgacacagactctggtaagggccctggcaaatgaaagaagtccctcaacaagcagtaatgacactgcaggagcataggtcctgaggcttggatatgggccatactaggccacatctccacacgcctgcactatcatgagggatttaacaagagttcatgaggcttatattgagtggtaacaggagtgtgaagcacttggagggatccccaaggataagaactttgtggttcagttagagatccaagaataagaacttggggccgggtgcggtggctcacgcctgtaaccccagcgctttgggaggccgaggcgggcggatcacgaggtcaggagatcaagaccatcctggctaacatggtgaaaccccgtctctactgaaaatacagaaaaattagccgggcgtggtggcgggcgccagtagtcccagctactcgggaagctgaggcaagagaatggcgtgaacctgggaggcggagcttgcagtgagccgagaccgcgccactgtgctctagcctgggcaacagagcaagattgccgtctcaaaaataaaaataaataaaaaaagaacttgggtttctatcagtagaacttcagtttctatcagtcttccccagtcctagcagtttagcccttatagccctgtaaaattcccacttttcattgttaatatgtgagtggggaaaaaaaatatatatgcagtcaacacaagtacatgcaataattgccacattatgaaagtgtatgggagggatgttggtgtattgggcatgctggcagtttggaatgtggtttttgttgatttaaagaagggtcctcaaagaggaaggtgggtctgaagttgtgatatagatgaagagagagttgtcaggtaagcttgaccaatagcttaatcaaaacttgagaaggtgcaagagaaaataggcacaagagagcatgtggtgggaaacgtgctgcctgttggctgtagtcttgcaggaagtgagagcagtgtggcagcaccagcttccttaaagggagggaaaaatgcagttgaacttgttctcctttgcccttaggacatgacttgggacatcaaatataagaccgtccgctggagctttgtggaatctttagagccctctcatgttgttcaagttcgctgttcaagtatgatgaaccagggcaacgtgtacggccagatcaccgtacgcatgcacacccggcaggtagaggcactcgtctgccttcctcccagctttttttcactctgagcttgggcacctccctctggagtgctgggtatggttgcccaggactgtagacagtaataaaaggtacactgtgatctgtcttccttgctgtgccgctgtccccttcccactgttacatgttggctctactaagatgtgtgaggatattctctcccactcttcctgatttttttttttcccccaagacagggtctcattctgtcacccaggctggagtgcagtgatgtgattgtggctcactgcagcctcaacctcctgggctcaagcaatcctcccacctcagcctccaagtagctgggactacaggggcacgcaaccatgcctggctaattttagtattttttgtagagaccagtcttgtcattttgcccaagctggtctcagactcctgagctcaagtgatccacccacctcagcctcccaaagtgctgggactataggcatgagccattgtgccccactccttcttggtcttgacttccccgtctctctgccccctgtcaaagaacttgtaagaataaagtgtcagtagttgatcagatagtcctagattcagaattccgagataactttttttctacccattaagattttttctggctgggcacagtaactcatgcctgtaatcccagcactttgggaggccacggcaggcagatcacaaggtcaggagttcaagaccagcctggccaacatggcaaaacactgtgtacactacaaatagaaaaattggccgggcatcatggtgtgtgcccgtagtcccacctactcaggaggctgaggcaggagaatcgcttgaacctggaaggcggaggttgcagtgagacgataccgtaccactgcactccagcctgggcaacagcaagactccgtctccaaaaaaaaaaaatttaaaaagatttttcttatggtggtttcaaaaatggttgtgtggcaggctgggtgcagtggctcacgcctgtaatcccagcactttgagaggccgaagcgggtggatcacctgaggtcaggagttggacagctgggtcaacatggtgacaccccatctctactaaaaaagacaaaaaaaatcatccaggagtggtggcacgtgcctgtaatcccagctacttgggaggctgaggcaggagaattgcttgaacccaggaggtagaggttgcagtgagctgagatcatgccactgcactccagccagggcaacagagtgagactctgtctcaaaaaaaaaaaaaaggttgtatggcaataaaacaaacaactcacactcacacaccaaaaaaactaagaggccagatttgcttttatccttgcagactctggccatctatgaccggtttggccggttgatgtatggacaggaagatgtacccaaggatgtcctggagtatgttgtattcgaaaagcagttgacaaacccctatggaagctggagaatgcataccaagatcgttcccccatgggcaccccctaagcagcccatccttaaggtaaggtggcttgcatggtttaagagagctgaggcactactcgtggtctcctaagccactctgtcgggctccacctagtggcgagagggggtgatgcaccacccaggaagggaaggccgggtgggtgggtgggtgggagcaagggatgaagctcttctgggtcagccatgggcttggttggtgggtaacctggcgtcctactctttcagacggtgatgatccctggccctcagctgaaaccagaagaagaatatgaagaggcacaaggagaggcccagaagcctcagctagcctgatgacaaaaatgacttctagggtgaagcctgggtgatgaggctgctggaagctttgaagtctcccattcccctcatgctataaaaagaactacctttgttctctcccatcctgctcaggtcttttcagcagtctcatcatcagcaaccatgactgatgactgggccctagcaggtggcaggtataacatggccatggacactcttcttttttaaattttatgtctagcttctgagtctagatgaaagacagtatgtttcagagaacattggatatcagtttttcccacagcagggactgtgagagacaaccagcagcatcctctttgtaatcacagggcagggatcagagtttgaaatgaaatgttgtcagggtgttggaaaaattttggtgagttctgcacatttcccctggttcaggctgggcatggaccagccttcagatggcagaagtggaagatgagcctacttgtgagcgatgtgactttaaggaaatgaagactggggaagaataattagtgtttataagacatttaagaggccctttttcatatactgactcactgatgaatcagcatttgcattttatggaaaaatataaatccaaagaaataatttatcccttagcctttgattgtgttcttaattattagctgtatcaggaagtgttgggggaggcaggggccatggagaggttgttacatttggaaaatttatctgcagtacttggttccctgatttctagcaccatttggagatggggactgttctttccagcccagtattgaaggtgagtgtacaaaagtatgaacctgtgcagaggaaaataggccagcccctccttgttccttagctccagatgggctgttaaaagggtgtgggacctcacatgcccatgtgtcctaggccatctgagtgtgacaagagaaatcactttgtttttgttttattttgttttttagagatggagtcttgctctgtcaggcccaggctggagtgcagtggcacgatctcggctcactgcaagctccacctcctggattcaagctattctcctgcctcagcttcccatgtagctgggactacaggcatgtgccaccatgcctggctgatttttgaattttttttttagtagagatggggtttcactatgtgttggccaggctggtctcgaactcctgtcctcaggtgatctgcctgcctcatcctcccaaagtgctgggattacaggtgtgagtcaccatgcctggcctgttaagtgttaactatggaaacaaaggtatgtatatttagggaagagacagccctggtgtctctcatcaaccactctcatcatgctgcttagtcccaacctttttggcttaaagtgtacatcactttaattactgcccaagtgaggtttggtcacatcctatttgcctgagccctggattaaggcaaaatgagaagggacgtgcttttgagcaggacccactgccagggagtatggaggaaggggaaataatccttgcagggtaaggaagcaaagaaatgaaaaaaaaaaaaaaagcacacttagtgggtaaatgatacattgattcctttgaatatgtaaaaatagtgcttcaaataagctgtttcatcccactcccctggatatctcagggttctctagataatcctaaataggagctaagcagtagctgccaccagagagccagaggatgagtgcaatttccatttccccttgggattaaatccagctgagcaaatggcctccagatgtgaggggctggctagaaggaccaggcagagaccatctgcagtgtcagcactgacctgggcactagcagagcattagccagataacccaaagtcccaagactgcagtgcaccttgagctttggagcaggcattgttctttccttatctatcttctgttactgtttaaaaatgttaaaaaaagataatcatgaataagctagagccaactgcaatgtcaagaaaaagcattctttatttccgccccgccccccccaccccatggtttatttcacaagagtgtgtttggcggcaactttgctgtttccagctagaccagacccaatgggattgttttggggtgcacagcaaaatccactttagctcagaagccgtaaggctaactagccagagcccagaacaacaacacacttcaattactgctccaaaagcccagaataagggccctaggtaagagaatgaggacatctggtccccaaaggagagtaggttactccattcctctgttcccttttggaaatggagtacttttttactttctctgtgaagtcccataaccgcccagcatatttacatgcagactagatgttaatggctctttttccctttgggtatttggtctccctgtttgtctttttctccccatgaatgacatcaatgtctgtactgttgtactgttagagggcgtgacttactgccatctttagtgcccctgtgcagctctgccttctctagctgccccttcccccctctcccacctccctttgccaatcttgggacttctttgtatgtttttctccttcttcctttccctctggtattatcatctaatcccagcaatttgtaatctagtactgcttaagcaagtgtagcctgaactgacgagagaagggagccaagaaagagagagctccctaagaaagaaggctttgtcttcacacagtgcccttttcccagctctcaggcttctaacttgccctgtagcactcctcttttagagggcagaagaagtagagtgctggctgtgtacaggactgcctttcttgagctcctctggaaggagattgatgtggcctcttgttactgagcaagtgattcttgggcggggaggggtgggggagggtggatgggtcttgcatcagaaccagagattccccttgactccagttgccttgacaaaagagagaggtcctgttgatggcagcgctgaaaagctagggggaaggaaatgagccagtgagacgagctctggagactggtgagagctagggcaggaagagggggagaccccctaaaaaactagcaagaggcacacaaggatgtctggaaggaagagctcccttgactgtggggaggacctggggcaattgcttttcttctgtgttctctctctctgatgttgctttggatgccagatgctgataagggtgtcagcgtgcctgattgtttctgcttcagcagtcaagcagggcaggtatgagaagcaataaagcagaaacaggagattcaaagtcaaaatgacaaggtccttaaagcattttcaggcccctattttgagtcattttagcttttcccccaatttatcttccgcttcaattaaatggctcttcagctttctatggtggcctttatagccttctgtggtccaccatccctacgttgccaacactttgtatggtttagtttcttctcaaaaaatgctccatcgtagacttcagagaattgggtccccctgtgagagaaggtaggctgggcacaactgacttttttcatccctaacagtggctttgtgggtgagtgtccagactcgggtggtttgtgttgtgagtactgtaggtggatgggaggcgtccttagaagtagagtgtccagtctttgtttcctcaaacaggaagaaaagttagaagtaaagagagggtgggccttcccattggggtctaagctgtacccttttcatgcagtttgtctttgggatgggttgacttctggtcttctcaaggaggggaagtggccaagctgtctttgattcagctctttgggaacacctggacttggaaagggccttggctcctgaaagctagctctgtgtttgacctcacctaataaggctgttactcccaatcccaaggatagacagtgggaggggtgaattcttcatactgagcttcaaaagccacttggcctgagtcttcagttaaggacgaagactgagactcagcttcctggagacttggctctggggctaagctggtccttggctcaagccctgaaggtccttgtagttctctgacaccttctagagtgaaagtactggctggcctgcttaccttggggcaggggattttgctttctggaaagaagtgatccagaggcccatggactaaaaggcatagtggtttttcaggagctgtggggaaaaattctctccgagttgctgttaaagccaggaggccagattcctcagatgggactccagtttcctccccaggacagatgtctgccatggtaccctttattttatttccttctggatctgtgatttcccattggcacagctctgccatcctgcttcccatgctgcctgcttccttggggctgactttgagttctgggtccagggcacctgactggggcaagagccctcctgagcctgtgccttccccagggcagactgcctcctgctctctgggctttgctgctgcttttgagaagtgttcttccgtccctccaggtcctgccttctgaaggaacatctctccttgcccttgtgattctctttcctgttccccttcctctgctgctcctccacccgcctcccaagggcagatctctgctttcttggcagagggagcctctaccacttcccacagacacacttccgctaccctggtctccacactgcctgctgcctcagaactgcctctgcttctgtcagaagcatctggggctggctgtggggacagacccttgccatcttgactctcccagggacacacagcctcctgctgcctgaagtctgccatctctggctttttctgaactggcacaccttttggctctgatttttctggggctctgcctttctcttcttgagagtccccttttccatcctgccttgacacccctttgacagggattctttcagtcacttcccagggacaggtctcagccttggcactgctgtcagatttatacacacctgcatcaggaacatcccatgggcacacgtcagcggccctgcccccagtgctgaccagtctctgggagctagctttaggttggtcagggcgctgtctgtctaggtgagagacggaatctgctggggcagtggtctcccatggacagacggattgtagctcatggcttgttttttccccatcttcagtagtgaattcttctgtgtctgcagctggagctttttcttgggttatgtgttctgggaaggaacctgtctttgggtcttgtctcaggtcccccttctctgttgcttccaaggaatgtccctctgccacttcactactcatgctgctgggcaagtctgagatcttgggggcctgagcaggggattccctcaagtccttgttctcccaaatacaaatagtttcctgttgttgacacagttttgccatcccttttgatacgtcttctcccagggaagtgagtctccccttttctagagctttctccctctgctctgctgattcactccctgccttttggtccaatcccttcccagtagttccttcacttacctcccagggacagatcttggctttttcactggtagcagcttcctgtgcttcccagggacacacttcacctggcctgcagcccatatgatccagttcctggaacccagcttttggtccatcagcatctagagtacctggatgctgagaacaggcccctggacccacactcccccagggacaagccacctcccactctggggttggcttctgtggcttctctggagcagtaacagctctctccctgggtccaagatctgcagaaaccttgcctgtatcatttggagatttcctaatggcctcagctcccaaagccctttcctcccctgctccagcacccacctcccagggacagatttctgccttcccagcagtcaagttttcctccacatccaaagggcaaatgtcggcagctttgcttcccacactgcctgacatctggagaagggtttggggtctctctgtgtcttgaggacgtggttgtggggagaagctgccagggtccacactctcccaggggccgaccgcttcttgcttttggatctgcccctcaggcttttcccaagctgtgacatcttcgatttccgattttccaggcattttctccttgtccttttgagattctcctcctcttggcacctgtgctgatgtccattcctctcttgttctttcatttacctcccagggacagatttctgttttggcaggtgttgcttcctgtgcctccggcctgagatcttcctgtggacacacctgcgttgctctgcttcctccattgcataggaattggctaccagctttggatgaggaattgtctagacatgggctggagtgcccagggaccgtgctctccctgggacaaactgactcctgctgttgacttaatttctgcactgctttcacagtttgttcccccatctctccaaagcttccttttctggaggctttttccttttcttgaagagattctctacctgtccccagactcagcatttcctgccccatcacgttatcatccagctcccagggacagatctctgctttctggatagcaggagcatctcctgcctcccacagacacacttcagcaatgccactgcccaaactccctgaacactctgagcttcctggggcctgaattgagactgctgaggggccccggaaatctgtactctcccatggacaaagagactccaagtctcctcccggtttctgttctttccaaaaggttgctttcctggttttctgcttttcctgagggagatccttcactgcctcttgggctggtttcccatcctcgcctccttcacttgcctcccagggacacggctctgccttggtgatgtcaggggtatgagcttctgggccagcagcttcccacccaggcttctccaccttcctggcctccacactgtcccccgcctcagatttgtctctgattctgccagggtcctgaggagctgacccaggggacagacctcctcgatcggcactctcccagggacacactgcttcctgctccctcaccagcctctctggctttttccgcatcatgggaaccacatctatgggctctgattttccccgggcctcccctctctttttttgggagtcacctgggtcttgtcttagtgccctcgactctggggctccttcactcgtctcccaggggcagatttcggccttgttgccactgtctggctgacgcgtttctgattcagtgacctcccaggggcatacctctgccaccctgtggtcagcgctgcccagggactggaggccagctttgggcagttcctgccacccgacaggggtttcttttgattgcttgatgtttttgtccctggaaacttgcctcagcatggcaagccctgttttacctgctctctcagctttccgttcccctagaccctgggtcatcctcctgcctctgtcttcttgttccctgctgccctcccgttgacagacttggagcatcctgctggtgtgagcgttctgttggttctggagggactccttgtcatcggaggggataagagcggcctgcttactcaccgccttgggccggcctagcctgggcgatcgggagggtgcccccatactctctcccgcagtcccgctgttctgcccctcgggactctcctccacactctccttctctctgtaggtgctccgagaacgggtcagagctttaatcgccagccccaggctgcgcatggaaccctgctgaacaggggccttgaggctgtgggatttagggaagatcttgggcctgtcttcgtccacatcattagcttccctctggtgatgtgcatcctctgcgtccatctcattctccccagccctgcttttctctactgcaacagagagggccctccagagcctggctcgagctggggcaggggagtggtggcctcgctctggccctgaggggccttcctggggcacattttcttgcttggctggcagttctgcgttctcccaggggcagatgtaggtgagtaagttggggctttgtggggatactgggactggtgccagggcaggggctggggttggagctagagctggcagcagagctggagccaaggtggaggtgggagatagcatccttggctctcccaggcccccagacagggccaagatgggggtagaaacctggtgcctgatgggtggatgaggcagccttctcctagcctcctcatgaagcctcccagaggtgtgagagctgtccacgctgctgctcttggcaggggaaggtggagctgacaggggggcccctcgaggccgctccagcctcctggctgatggcctccgcaccaggctggccatggctgccttggccttcttccgctcctcccgctcctttgcttgccggtaggtctcctccaggtaggcctggctggccatgagcaaggccttttccctggagctggccacactgagcgacttctgcagagaggcgggccgggctctgggtagcctctctcccaccgtcaggttgtgggcgctggctgacctgaagcccagggcagggggcccctccaccgactcccggctctctgttcgagaggccttcttggccagcttcctcctcagcagtgagtcaagaagaggcgggtcctgctccctgcgctggtcataggtgctgcgggacttgtgcagagctggtgtcccctcgggttcctggaggctggagctgaggagccggcggcgggaggagccgggcaggctgccgtggcctggggatcctgagtcccgggagtgctgcctggccagggcctcggggaattccgccaggtacctcatgaaggagcggcccagtccctggcatgagctgcctcgcttcttgggcaggtgggggttgtttgcggccatttccttggttttgtggacctctagctgggcatagagcttcttcagctcgtcctgtggggcagcagggaggaaagcagggctgcaggtgagctctctccatcccctggctgtctgttcctccacccttgcctagacctttttcccttagggatctctttccatcaagctgtatctcttccctgcttctaaaactctcgtaattcacctctttgttcctgtgagaccagttgccaacctgagtcccagccagatccagtcagctcggaggactcatgtgtacccccttctctggggcattgtggtctagtgggaagttagtagcttggggacactcaatatgctgtgtccctggaggctgttttcatgacccctccctctgagcctctggatcttctgtaaagcaatgttacctgggtgaccagtgttaacttccttaagagcattatatgagattgatgagactagtgggtttgaaatatgcagtgttcaggtgtaaatgatggaacggggctttagaagtcttctgttctgggtttctccccagatccagcataggggccgcagattggcttgtgttccagaaagtggagggtcaggggtggagctgcccctccatactccctggcccttcagctggattggggtctcaggaggcagggcaggcagagctcagagggtgaggacacaagggggaaacgggcagaggcactggaacaaggaaggactcaggagatgcagaggactctgctttgtgggcctgtaaacaagtcaggtgtgaagacggccccagtagaggtggagggggtggacagaatggcttcccatgatggttcctagactctggattgtataaaacaatgggcttagattatcagctctccttgtatcttacccactgagcctcttgttagggttctggtgactataatgatccccttgagcacagaaatgagaataagcatgcttttccagtgtagacccaggaagaacttcctctaagacctgccaggtccagggaaaggggatcctggtggctactcactgcctgaactacccagccccacagctggccctaggctggccctaggtgccctaggcaccaaccatcctgctttgctgggggctgaggcttttttgtgtgtgtgtgtcagaatcttactctttcacccaggctggagtgcagtggtgcgatctcagctcactgcaacctcaacttaccaggctccagtgatcctcctcccacctcagcctcctgagtagctgggaccacagacatgtaccaccatgcctggctaatttttgtatttctagtagagacgagatttcgccatttggccaggctggtcaaactcctggcctcaagtgatccgcctgccttggcctcccaaaatgctgggattacaggcatgaaccactgtgcccagccagctgaggggtttcttagactgcccccgacctgatgcccctgctgagtgagagtggaggatgcgaaggagtagggctccactctcggccctgcctctagcttgccacatggcctgagcctccgggatctggttctggggctttggggtcttcccacttgggtgtgtgtggcctcctttgaatagagtcaggggaatcagtttaggccagtggagaagggagagggcaggtcttggagggaagaggacttgcagtggcacatagcccaggtggcagggcccagtcctccctctgcccagttcctaaaagctagcattgaaaggaggcagggagggtggcacatacccgaatgtctccagggtccaggctgtgctcactccaggctgaggcgatgctgctgccaaggtaggagcctgagtgctgcaggtccagctcgtcctcacacacctcatccaccatctcctcccggggaggagcccccagcttccagaactggcaggggtgcataagagtgggaaaaagactcgccctggctccttgtccactcctgcactcacctgccctgtggaatgcgtccttactttgtgacgcttcacccccttctctgacttggaattctggggatctttagagttttactcccctcatcctccctgaccttctctagctcagacagcagggtggttctaagcccctgaccctgcaattcctagccgggtccttcagctctcccacctctccctgtatacctgcttctgagtagattttcagagtgtgccaaccttccagctgcaggagggagcccctccagccctgggttttctttcccttgcccaggaactggaagcagagagtgtccccactcaagtcagctcctagcttagggcccctggcactgtgctcactcacccagcaccttctgtcgtcctcaccctggcctgcagagggcgctgcgggacaaccgctccacagtggccctgacagaggggctggggtccacctcacaggcaggaggggagggcctcaccttagggatgaagatcagagccagcgtggtggtgactgtgctgtgggtgtggaagaagaagaggaggagggtccagtccgggtgcagagagggaaccagcacaaacctggggcgggataggggcgcaggtcattactgcaggcaggagttgcctcttctgctttgccttctcactggcgtttcacctcagccccaaccctgatacgcttaggacgagggggcattctgccctctcctgccctctccaggatttaggtcccacttcaatcctgttaatcccaacctccaagacgccctcccagaatactccagctcactttctttggctgtgtatagcacagacctgtgctccagactcttaggcccactctgtgggttaactctgcctccaccacagggtctggtcgttatggacaaacagcagcctgctgctcttatggctgaggagtgaggggagaaggcagggaggactgagcatgtgtggaaaggggtatgttggggtgctggagaggtgctttgggaggggtgaggagttaggaggaaggtcctcttcctcctcttctgtgttgggggcctcctcacctgggccaggcatggagtacagaaggggcatctggggggtagggagagagccagaagtgggggccttcgtcaacgtgctgaggcgtagcagtgttgccaggatggcatgggatgggggcacctcacctgggagaggtgaggagtactgttagagtggaagggggtgtggggaggtgagtccgtcctcacctggctgtgtggaaggcagcggaaagcagtagctcattgtgcagggcgatgcccatgtagcgtggctcatggaaggccgagagcacagcccgtgtggcgtagcagaggaagctgccccagcacagcagcagcagctcagctgtggggagacagggagggagagagccggcaccacctcagcagctgtcccacccctttctctgaaagatgtgctggggggagcctgggctcggggtctggggacaagtcaggagaaccagaacaagaggaaccctggaggcacagaggcagggaccagcgtaaggctgggctcagcagaagcagctcacccacaaccatgatgtagtcccagcggtcgtggtgacagaggtagaaatggcggccactgggagtgtggcctcggatcaccagaggtgcgtgctggatgcctcgctccagggcgcccacggtccacacagccaggaagcccagcacaggtagcaggagcagccccaggtgccgcagcagccgcccgctgctcagaagggcactccgctgggccgttcgagacagaaacagctgcagcactctgcgagggttagaatacacagggtggatggcagggacctgggtggatcacgaagagggtgccagcgccctggtctctgtccattgctgccctctcctccacacaggtacttgtccttccatcctttttgtgatttgctgccttttgctacccccccacaaagtaacatggaagacaaggctatggtgatgggggttggccttgggggtagaggggagtggggctggcaagggtctggctttgaaaaacaccattccatgagtgagctggggtggtctgggatgagcagcatgagagcaaagtctgccccaggccgtacctgtaaagcttgagtatgatggtgccgtagacgatggcaaaacccagcagccgcacccagcgaagagcgatgcagcggaatacactgggcttgaagtataggatgaagacctggtgggaaggggcaaaaatctctgctctctactatgcttctgctgtgggccaggcctatgctaagcacactgtggatcctcccaacagccctgcaatagagccatcaccaccttcattctgcagaggagcagctgaagtgtcaaagaagttaggtaacttgccctaaatcacactgcaagtcacagagctcctaataagcctgaggctccagagctcatagaccagcttgccatttgtgggtaagagtaggggaaatctgtggtctctgaatcccttccagagggcagagaagggttctggggcttggagggtgccaggttttggctatgggggatgctggaaggtggggccagcctgtggccacagactcacaggaaagtaaagcagcaggaatccaaaaaggacagtttccagcaggaccactccagatgcccagatcctctgtgaagcaaggagagaggcatgtgagcagagtctggacgatggttctagaggctctcaggcctatgtgaacggtcactcagtgaccctgagctaaggcttcaccctgtaacactggctctgccctctctgcccacatccacgtcccttgttaccccaggctcaactccactggcactaaacatggctaaggccaaggttttacatcattcccacacacacatccctgtgttcctcccagtcttgctcagggccttgctgcagacctaggctcaaatcagaggctgctggagctggaagggatctcatgcattcctcaagcgttgggtcaggctgctcccttgtctagaatagggtaccccttcttggcccagtaagtatccagttaaccttcaagcctggctcatgtcacatccagaaagtctttcccatgccatctcaggcaggatgactttctgtaagctcccacagcagctgacagacacctccatccttgcccccatctcactgtgctgtcattttatttacatgtctgcttcctccattaaactgggaactccatgcaggcccagatcacttccatttgagcctaggcagtgttttgcttagagtagatactcaactagcatttattgaatcaagttcaatgcccttattttacagatgaggaagcaggtccaaggcggagaaatcacttgcatcatgctacacagtgagttagatttagaatcaagattagaaccaatttctcctaaattctggtcttaggtagtctcaggcctccagttgagatgggtcggacatgtgtgtaggaggtgtggggccttccttgccttgttccggcggcagcggtaggagaccagcatgctcaggaagatggccagcatgcagcaggcctggcaggccagcacagcggcccgcagcaccgcggcctcttccaccaggcacggtgtggcatccatgcagctggtgcagccctcaggacatggcagacactgcagcagtctcccagatctgccttctgggaacccgaattgcccggtagtctggaagtcactctcctctaaccctataaagaacaagatgagtgcagggagaggggcccagctagagcatcctgacatcccagccttttccctgatagtcaccacagccctctccctgttctcctgtgatctggggctccagggacaagtgggaatgggtgcttccttgggagggcaaagtaccaggaagaggtgacaccaggctagggctccttgagaggccaacttgcatcatatttgcatgttacaggctcatactcagaaggtgtagacacccccacactgcaacctgcttgcctctcctgcctctctcaaccttctgcccttgccccacaagttccctcccagtgtctcaccccaatctggctttcttccccagatgtaccctcccaaccatcctctcatgtaaaacacatgcctggcccccaccacacttacatacccccagaggggcttgccccgtagaatccaggtcggcagcggcagaggtagcggccaagaacaaagccctgactctccagggggacacactatggggacaacaaacacagtatgtgtttatgtggggctttctctggaagagctttccctcctgggagagatggagggtccatctacctccctatccatgggacttgggtccacactagggaatccctccagaagccctctctagtccttgggaagccttccctctgtggaaaccctacctgacccctgctgttgcctctcttcccaaagagaccctaagcaaagagtacagggagaaatcacccttttgttcagactggcagtgacaggagcctcataggacccatttcctagtggccagctcttgctagggcaaggtactgggggagatggaagtagggaaagttctgagcccagccataccttgtgtgcctacatcctacttcaaagggtccccatcagcttccatctttggcacacaaatggactggaaaggccccccacggaggagcagcttccttcaccagggaccatctggctttcgcacaggactgtttttcccagccttaatgccaggctaatgccaggctggtgggatgccaaggccagcctttattccacctcctcctattgatgtttgcccggcaggggacagagcagacctcagagccaggcagggaatatgaacaaatgaggtcagatctattgtggggagtggctgggaacagacatcagtgacgcaaatgaaagggttaaccttggaagattctatatcgagcccctgacctcacttagtagggttagtgtgtggtgcttgtgaagctgtggcccaacttcccctcttgcttggaccactggactacacagtctgcacaattagacaaacatgcacccagagaagtgaatgtgtctgggttaaacagtgaactggatggtgggagcccttttccatccctccacctctagctgcagacacatgtgccctgaagagcagtagaaccacctgtgcacacagaacaatatgcccaccagccccagcaggccacagggctcgccctggctttggctcagctcaggaacaagcatgcagtgattgtaaccatggagcgggtgaattcactggcctcccagtttcccagtactgggtttgcatgatttccagccagtgctctccatcactgtgagtcacctgcacccgtagctttgaatctacctgcatctggcccaggttccatcacattcactggtcccaggcctcttcgagctccttggttggttagattcctcccatactccaaccagcaattccatttatttcagcaatatggaacacccttttgtagacagaccaatggaacatcctttgtgggccaagaggagcccagagctgtgttacatgaagaatgtgttcccgggggaaggaaaggagataagtaactgaggctcaggaagtcaccctggggaggggtcctggagcactgagtaccagaaaggagagcagacaggaagaacactgaactttcaaaggaatgagggcaggagcaggaggaatagggggtgggggggcaggctgtaggtgacctgactttttaaaagcctggtatctcacctctgccaatcactaggaactcccctgaagccctgagatgctggggtagctttgtctgctgctcctgggagctgcatggtggcggtgatgggaaaaggggagggaggcaggactctagtagcgccccccatcctcctcatccttacctgggtgctgttgagatcacacaggtgtgtgttagagtaccagcctgggccacttgcacactgattgatgtccacactctggagatctacgtccatctgcacctgccccctacggcagtgaattggcaattaggggcacagtgattgatgccaaagtggacgtgtgtccctgggcgttgttggggcccagaaaatgatgctcggaattatggcactttggcatgctgaggactttgaactaaaggagattagaagggttcagaagtaaggtctctccgaccttctccttctctcttgtctcctgcccctctttctccccgctgaagtgagttctagaaaccagaattccccttccccaaggcaggtcatagaaactagaatccccctcccccagagcaagatataaaaccaagaactattactctcatcttcccctgcctttctgtgtaggagctggtcataaagaaattctctggcctgccttgactgatagtaagtaggtcatatgaccctcattccagagggatcctgccctgtacctgggaggaaggatgctacatagacaggccaagaggaagctgaacagaggcctggctgagtttccctatttggtctactaccattagatcatagacttttttgtccaatcacagttctacagggctgaccatgcttcatggaatctaagcataacaatgaacagttttccctgagtctattctttctttttttttcttagacacacagtcttgctctgttgcccaggctggagtgcagtggcatgatcatagctcactgccacctccacctctttggctcaagtgattctctcacctcagtctccaaagtagctgggactacaggcatgtgccaccatgcctggctagtttttaaaaattatttttagtggagacaagttctggctatattgctcaggctggtcttgaactcctgggcccaagcaatcctcccacctcagcctcccaagtagctgggactacaaacatatgccaccatgcctggctagtttttaaaaattatttttagtggagacgagctttggttatattgttcaggctggtcttgaactcctggactcaagccatcctcccacctgggcgtcccaaagtgctgggattatatgtgtaagccactgagcctctgccactgggtcttcatttctgaaggctcctgtgtcatgtaaaactttggctaaataggcggggtgcagtggctcatgcctgtaatcccagcactttgggaggccgaggcaggtgcataatctgagaccaggagttcgagaccagcctggccaacatggagaaaccttgtctctactaaaaatacaaaaatcagccgggcatggtggctcatgcctgtaatcccagatactcaggaggctgaggcaggagaatcgcttgaacccaggaggcggaggttgcagtgagccaagatggcgccactacacttcagcctagtgacagagcaagagtccatctcaaaaacaaacacacaaacaaacaaacaaacaaaaaactttgattaaataaatttgttatgcctttctcttgttaatctgtcttttgttataggagtattgtgacccttatgatgagtgaggaaagggatcacacttttctgcccctacaggcactagatctggggacaatgcagtctttgcaaactttagcccagcacctgcagtgtgtgcgaagggcatgcatgtattccatttctccagtattatgaatgttcactgtctctgtggacaacagtcttctttctactaggttgttctctccacccctcagctttttgatatcctatcatttcctggtttctgtcaaggaggagagacagggcgcatgtcaagacatggcaggagtcagggctctgatgatctctgaagaggattttcacacttcctcatgcatgtacacacgcacacacacagagatcagctcagctattaaccatctcctctctctgcccaagccaggtctgaattgatcacagcaaaggagatatgaaatagaggagccctgacctggcactgcctggaccagcagttccccagcctttgctctgggctgagctggcaaggagccaggctgcctgctggcaggaggagaaccctgctgggaacaatgaatggggacacagagctggagaagcagtgttgattgttgaatgccctgcagtcctaggctcagtcgctgctcccttcccaataggaccctcaatccttctttcctgtggttgagggaggaggtagtttactggaggagaatcacaagcttctgcgtcaggacaggcaggatagtgcggcctgcttggtttaagaagatggccctggggactcagccagctccttggcagaaagagcattgattccaagccccctcaagagttttccttccgctgggtgtggtggctcacacctgtaatcccagcaatttgggaggccgaggcgggcagatcacttgaggtcaggagttcgagaccagcctggccaacatagtgaaaccccatctctactaaaatacaaaaagtagccaggtatgatgatgcgcacctgtaatcccagctactcaggaggctgaggcaggagaatcatctgtacctgggaggctgcagctgccgtgagccgaggttgcaccactgcactatagcctgggcgacagagcgagactctgtcttgaaaaaaaaaaagttttccttctccggggaagcctcattttacagctctcagttgctagagagcagtaggttgaacgcctggagtgcccacccagctctccactaacaagcctggtgcatagattgtcactgtcatccacaccaagacctctcctgcctcttgcactcccttctcaggcctgggggccaagacctctgcctgtctatactgacacatcttttttttttttttttgagacagagttttgctcttgttgcccaggctggagtgcaatggcgtgatctcgggtcaccgcaacgtctgcctctggggttcaggttcaagtgattctcctgcctcagcctcctgagtagctgggtttacaggtactcgctaccacacccagctaattttgtatttttagtagagatggggtttctccatgttggtcagtctggtcttgaactcctgacctcaggtgatccacccgcctcagcctcccaaagtgttgggattacaggcgtgagccactgcacccagctatactgacatatctctacacacatgtgtatacctgcatatagatgtatgctacatatgtatacctatttgtatatgcacaggctcacagacattcctgcatgtgctcaagcacataaacccagataaatatggattgatttatacacatgtacactcacacctgtatgtgttaacagatagttgcagattcccagagccgactgtaagtacacacagctgagtacaaatacccacatctgtgtgccccccaggcatgcacatgttcgtgccaaatggcccaggcacagctgaggggacctgtacttccttcccctacatccccacacatgcatcaaatcctgcacaaacccacttacctgacttctgggctgaggtctggcttgagtccatagaaggtggcagagagtgtgatcagccatccaggtcggagccgtccctcctggcattccaggaaaggaggagacagcctcacctgctgcgtgtcccccacatatccatctgcctgcggccacttggggctgccgaggctccctaggtcattggtcaacactcgcttcttcagggcaggggtgtccaggtccccaggagggttctcctcctgcacccagttcccagacaagtcctgcaggatggtttcctccccagtccgggtggcctgcagggccagctgtaggtggctggcccctggtggagggttaaaggtcagcaaagccctgtacactcttgggtccccctcggccacgctgcggaccagtgcctggtaccattccacatcctcctccacactggactcacggatgtcgttggcttgcagcagcatgttgagaaaattggcggcctgggcaagggtgcccgctgccccctgtaggcttggggggagccctggcatggctcctgccccacgcgcttcatagcgctcactgcaattcacctgtgatagctgctgggcatctccagagtagagataagcgagggcggcctcggccccctctaggggcacctgcatgggtacagatcctggcttgacttgggaagacagagggggcagagagcggatgggccgtggaccccccagagcccaggcacagacaaaacagcagcccagcagcccccacataggagggggcatgaccgctcccctggtgcccatccttggggcagctctcaggaccctggggtccaggctcaggagagcccaggcagaggctggctgcagtctgggggctgtcggcctccacgcctcctatgctggcgttccttcttcctctctccgtctccctctcacgctggtgccagctcgcctgcttttttcttctctctaacgtcaccagctggcttctggatgtaggtatgagggccctgccccctactgtctcagtgcggccccctatctcaaacctcttaatcccagcaccccactctttcctcccctcctatccagtattcaggctccctccatcccccatccacatctgctcccgagggagagagatgggagggaaggggagacgaaggcaccagttgtgctctttctccctccctccctctgcctgccctttgctccattaggagagatgggcaaatccaggatggggcaccatagcaaccgcagatgagcttgtgcccctctctccacccctctgctccactcaggctcctggcagcaattgcaacaggcacactaaggggccaagctgcatctcctggcagtctgcgctggctgcctgcacccccctgaccctgtgctgctgagctgggatttgagaatggggatgttgagggcaggaaagacagcctaatagtaccgtaattggtctttgtacagactgaggcagcttataaggtgcttttcatgtgccttatctgaatgagtcttccccacagccatgtatggtgaatgttcttatccccatttcacagatgcagacactgagactcacccaaggtcacaaagcagctcactcagagacttacatccagagctctgactcccctacattgcccatccaaaccaccaccatcaccgttactcagcctcagggactataacaaagcctcctagcagaggcgtcaagggacttccctagaaccacagtgttgtttatgacagagccgcagcctccacccaggtgtccgtccctacaacccaggcctccttctgaaccaaagtcgacaagcacagtggcaatggtggcgggagagaggtgggcaaggagaagacagtgaacacagttttgcctccatttcttacaccttcattttgtcatcctaagttctaccttcttctttttttttttttttttgagatagattctttgtccacccagctggagttgcaccagcgtgatctcggctcactgcaacctctgcctcctgggtttaagcgattctcctgcttcagcttcctgagtagctgggactacaggcatgtgccaccatgctcggcaaattttattttatttttttttttaaattttttagtagagacgggggtttcaccatgttggccaggctggtctcgaactcctgacaagtagtctacctgcctcagcctcccaaagtgctgggattacaggtgtgagccactgcacctggccccttctccttttcttcatgaaaactgtggctactctctctcgcttttccccatttttcttacccctcacctccttcctgctgctaggcacagtaactggggggccctgagtcagtgctgtctgagccggcctccttggatccggaagggcatggattcttggggaagccacagaacaaagctcctgcctgcccacccatcacttttcccttgatgatgggcttcctgcttcaccaggcaatctggccccgcaggcgcaggctgtctcttggcttcttcccttcaaaccccctccaaacccccaatgtctggaacctttgatgtccaagatcattgagtgtatgtaggtagggatgggtggtggttgccaaacatgtcccttgctttccagttgacctctgcaaacaataattctttttttttagacagagtcttgttctgttgcccaggctggagtgcagtggcacaatctcggctcactgaaacctctgcctcccgggttcaagtgattctcctgcctcagcctcccaagtagctgggagtacaggcgtgtgccaccacgcctggctaatttttgtatttttggtagagatggtgtttcaccatgttggctaggctgatcttgaaaccctgacctcaggtgatctgcctgccttgacctctcaaagtgcggggattacaggcgtgagccaccgtgcccggccttgcaaagaacaattgtgctatgcaacctaagtgggagtgcccaggctgtggggatagcggggctagaggacaagcccccaggagaatctctatgatggcaaaactagcagggcccatagcccagacttttttttttttttttttttttaacaaattaggaaactaaaacactgaaaggaaagtgacattcacaaggtcacccagccagttagtggtattgctgggagcagaaacctgtattgcacatccatagctctttccttggcctttctgagtgacttattcaatttcttggtatttattactggttactgttagttgagggtcaacaaaacacactgggtgaagacaatagtaacttatcatgaaaagcttcttgggaaaaaatgtattaagttattaccatgaaaagcttcttgggaaaaaatgtattaactaacatttgtatagcactgtagaatttattaagtacctttacacgtaagttttcatttaattccccacaatagccatgtcaaggggggattattactgacccattttaacaaatgaaacacgggttcggagatgtttaattatttgcgtttgctcatatattcagaaagtggcatgattaagactaactagaccaaccacaaagtccagagggacagggattgtgtctgtctcatttatcactgcatccccaaacctagcccaccgttgaatgaccaaatgaatctcagaacttctttagattctttatcatttttttgttttgaggcagggtctcgctctatcaccagcctggagtgcagtggtgagatcatggcttcctacagcctcggcctcccaggctcaagtgagcctcccacctcagcctcctgagtagctgggactacaggcatgtgccaccacacctggctaattaaaaaaaaaaaaaaaaaaaaggccgagcacggtggctcacgcctgtaatcccagcactttgggaggccgaggtgggtggatcacgaggtcaggagttcaagatcagcctggctggccaggggcagtggctcacgcctgtaatcccagcactttgggaggccgaggtgggtggatcacgaggtcaggagatggggaccatcctggctaacacggtgaaatctcatctctactaaaaatacaaaaaaattagccgggtatggtggcaggcgcctgtagtcccagcgactcaggaggctgaggcaggagaatggcgtgaacccgggaggcagagcttgcagtgagccgacatcgcgccaccgcactccagcctgggcgacacagcgagactctgactcaaaaaaaaaaaaaaaaaaaatcagcctggccaagatggtgaaacccggcctctactaaaaaatacagaagaattagccaggcatggtgttgggcacttgtaatcccagctactcgggaggctgaggcagagaactacttgaacccaggaggcagaggttgcagtgagccgagatcgcaccactgcactccagtctgggcaacagagagagacaacgtccccccgcccaaaaaaaaaattgtggagatgaggtctcactatgttgtcgagggtggtctcaaactcctgggctcaagtgatccttctaccttggtctcccaaagtgcgaggattacaggtgtgagccactgtgccagaccttaaattctttaagtcatccttcataaaagtttttaaaactaggactctatctctgtagggacctttttttttttttttgagacagggtttcactcagtcacccaagctggagtgtctatcacccagactaaagtgcagtggcacaatcacggctcactgcagcctccaccgccagggcttgcttaatggatcctcccacctcagcctcccaagtagctgagactacaggtgcgtgccatcatgcccaggtaaatatatatatatatatatatattttttttttggcggtgggaatagagatggggttttgccttactgccctggctggtctcaaactcctgggctcaagtgatccgcccacttcaacctcccaaagtgttgtgattataggcgtgagccactgtgcccaccttattttctgttttacttttttgagacagggtctctcactctgtcacccaggcaggggtgcagtggcatgaacacagctcactccacttctgacccctgggctcaagtgattctcctgcctcagcctcctgagtagctgggattacaggtgcacgccaccacgcccaactattttttttttattttttgtagagacgaggtctcacgacatcctcacaacattgggtctctttgttgcccaacctggtcacaaactcccaggctaaagtgatccgcctaccttggcctcccaaagtgctgggattataggcttgagccaccacgctcggctgaggaccacttttatagtgctcagtgaaagaggtatatttaaacataaaatcagctcaataaacataaatttggcagggcgcagtggctcacacctgtaatcccaacactttgggaagctgaggcaggtggatcaattgaggtcaggagtttgagaccagcctggccaacatggcggaaccctgtctctactaaaaacaaaaaaattagctgggcctggtggcatgcgccggtaatctcagctactcaggaggctgaggcaggagaattgcttgaacgcaggaggcagaggttgcagtgagccgagatcatacctatgcactccagcctgggaaacaagaatgaaactctgaggccgggcgccgtggctcacgcctgtaatcccagcacttcgggaggctgaggcaggcagatcaatgaggttgggagatcgagatgagcctgaccaacatggagaaactctgtctctactaaaaatacaaaattagctaggcgtggtggcgcatgcctgtaatcccagctacttgggaggctgaggcaggagaatcgcttgaacctggcaggcagaggttgcagtgagccaagatagcgccattgcactccagcctgggcaacaagagcaaaattccgtctaaaaaaacaaaacaaaacaaacaaacaaaaacacaaaagaatgaaatgctgtctcaaaacaaacaaacaacccccaacacaaattcaagtcctacaaatgcaaagatacaccctctttgcttggaatttaactttcaatgttttttccaggatctgggctacggaaatggacaattatggaaatgggaaaagtctaccccatggcttgccctgccttagaaagagctcgcgtgtgttcctctgtacctctgtgcactccgtgcaagtagagatactccagataacccacacagtcctcttctcccacggccaggaaagcagctggacagcagagggcgatgaagagccagggaccttgcctgtaatcagcttgtaatgggctctgaggccagagagtttctcagagagaaagctggggatcttgggtagtcttcttaggcctcaggtgttgtgtgattctatagcaatttctcttcttttattcatttatctatatagagacacggtcttgctctgtcacccaggctagagtgcagtggtgtgatcacagctcactgcagtctccacctcctgggctcaagcaatcctcctgcctcagcctcctgagtagctgagaccacatctgggcacaccaccatgcctggctaattttaacatttgttgtagagccagagtgttgctatgttgccctggctggccttaaactcctggcctcaagtgatccaagacctgccttggcctccccaagcgctggaattacagacgtgggtaaacatgcccctctcaatcgctcttcttttcttcagaaacctgagtgacacctgagaggcagccaggggaagagaatgaactatctggagtcagagctggttttgattttcactgcatccttttgaattgagtgactttagctaaataactcactgaggtttactttgtctctttatgtgtgaggaaagataattaattctgttgtgcagaatttgtctcaggagactcttacagggcttaaggttgaacaacaattccaggcactgtccttggcactggagagtccccaaggggcaaaaagcaaacatggcttctgccctcatagaatttacagttttgtagggaggacagcttttaatcaactgaccccacagacagattgcaaattacacctgcgcaagtaagtgcaacaaaggaatgatctcagagcctggggaggaggaagggcccaggcagggagatttccctaaggtagtgaggagtgagttcaatctgaaggatgagtaggagtttactaagcaaaaagagaaaagtcttgcaagaaaagggaatagcttttcttgcccacatgtatgggagcctgccgcaaggttgatgggaatgcagggaacagagaacaaggtggagcttagcaggggatgtggctagagaggcaggggttagatcacacaggggtcagatcacaagatcacacattagcctaagaacaatgggaagccatgaacaattttaatcacaggctatgaacacatttccattctgaaaaggtccctctggttgcaggactcaaccctccaccctcttcccctcaatgcaccctcaggtattagaagtcactgagttctgcagctgatccttcctccttttcccttgcatctctcaatatctcccactgggactatttcaatgggctccctgcctccagtctcacctcctccacacaaaaagcttgatcttatttgatcctcacaacatgcctgcaagcaagcaaaattgcaatccttatccctgtgtaaagataagaaggccgggcgtgggcgcggtggctcacgcctgtaatcccagcattttgggaggccaaggcgggtggatcacctgaggtcaggagttcaaaactggcctggccaacatggtgaaaccctgtctctactaagaatacaaaaaattacctggagcgaggcaggagaattgcttgaacccgggaggcagaggttgcagtgagccaagatagcgccattgcactccagcctgggcaatagagaaagattccatctcaacaacagcaaaaacttaatgtgttgtctgtagccgttacattatgaatagcacaaaaattgagtaaatattcttccagtatttgaaaccgttttctgactcagcaaagaagttgctcccatcattgacaatccaattaagttttgtctttttcagttttatcaaccaacattcacctttacaattacactcctaggtcaactgcaatcacagtttggctacccatataagagtttggcaaaaatcaatgaaagcattctgtgagaaagagttatatggaatttgccaatttactattaattgtaaattgtgaactacacatcctttatgtcagtaaaacttaacgacaaatttttgtacctatatatgtgcatacattcccgttctccccccagagagctggttgttacacatttatcagtacagcactgggtctagaacacgattcatgtactgattccacaaacattcactgggtgccaggcggacggagatacagattaatgatgaaatgactcagccaaggtcacacatcgcaagcggcgtagatggcagaaccatatgtgctcccaaggccagcggcgcgctcccaggaccagaccatggtttccaaggcctctccactctaccgaatgggatggcctgggcctgggcgcccaggaagtgaaaagcaaggaccgggaaaagagaccaacgccagccaacagacagctcaccgccaataggggccgggggcgcgcgcggcgtcactcgccgtggaggccagcgcgagcacgccctggggaaagtggcgtggctaagcccttccggaagtgacgtcggcttgggggcggtgctcggcggtggcggagcgcggcctgggctcgcgctgggctccgcgcgccccccgcccccctctatgaggcagaggccgcggcggccgttagcgctgtcgctccgggggccgcggcgggcggggctccggcggggcccggcctagtccccaccccagcccggctcccagccgcccgccctccctccctctccccgatgcaggaggccgagctccgggatggcgaggcggcggcggcggccgcttcgtaccgcgtcctgagccgcctccttggctatggagaggcggcccccgagccaggccctccgccaccgcccccgggccatggccccccgccgccacccttcctcgcgcggcccggcccgcggggctcccggccgccgcagctgatggtgttccgcaacgtgggtcggccgccggaggaggaggacgtggaggcggccccggagccgggaccctcggaactgctgtgtccccggcaccgctgtgccctggaccccaaggccctgccgccgggcttggcgctcgagcggacctggggcccggcggctggactagaggcgcagttggcggctctggggctcgggcagccggcggggccgggggtcaagacagtcggtgggggttgctgcccgtgtccgtgtcctcctcagccgccccctccgcagccccagccgcctgctgccgccccgcaggccggggaggaccccacggaaacgagcgacgcgctgctggtcctggagggcttggaatcggaggccgagagcctggagactaacagctgctcggaagaggagctcagcagcccgggtcgcggaggaggagggggcggccggcttctgctgcagcccccaggccctgaattacctccggtgcccttcccgctgcaggacttggtccctctggggcgcctgagtagaggggagcagcagcagcagcagcagcagcaacctcccccgcccccgcctcctcccgggcccctccggccactcgcgggtccttctcggaagggctccttcaaaatccgcctcagtcgcctctttcgcaccaagagctgcaacggtggctccggcggtggggatgggaccggcaagaggccttctggagagctggctgcttcagctgcgagcctgacagacatgggaggctctgcgggccgggagctggacgcggggaggtgagaccggccgggggctggccgacaaacttccttttcttgtttggtttccctttttatctattgctatcgcgatcctgacagttcttaagatagggtcttcaggaggaggcagagacttgggaccaaaggtggtaacatctcgcataaggtcagcgctaattgtggaaacagctttcactcttaaagagtgcacactccgtgacacttctcagctggtttgcatctgtcttgttggaagatggtttcagaccatcctcccatccccatcctggcatggctttttaagtttttccaaggcggctgtgtgccattgtccctggaagggagattgctggaagtgtttggcctttggggcaaaaagctggtgttgcaccttgaccgccttgcttattctgtgtaccagcaccgcacctcccttcacactcatgcatgcaaatgacaggagaatcttcaaatgcaattgtaggccagcaatcaattggacacctctattcaaagttttactgttttcctggttgttcccttagatgaacttggcatatcaaacttgggtgctgaccactgtctctgagaatagaaaatagcagaccgggcacagtggctcacacctgtaatcccagcactttgggaggccgaggagggcggatcacctgagctcaggagtttgagaccagcctgggcaacatgcgaaaccccatctctacaaaacaaacaaacaaaaaattagcccccatctctacgaaaaaaatacaaaaaattaggcgggagtggtcccagctactcgggaggctgaggcaggaggatcacttgagcccaggaggcggaggttgcagtgaatagtgatcgtgccactgcactccagcttgcgtgacagagtgagagcctgtctcgagaaaatagctttgcgctctctcaaagccttttgagaattctaagtaccagtaagatatagacaaggtagagacaggtacatgagttctaggccgattgatgaaaattccaaacatagacgttgagtttttttcctgcatttctgaggggtggactgatcttcggcatccagtgttacatctgtagcgttggtttacaaagctgtcaactttggtgtcagtgaaattagttaccttgtagtaactgccattgtggtttgtacttctttgggttctcagaaagattggaatgggttttgttgtggtttacgtgatggattcttgagacatactggcagccataaaccaaagctaaagaacaggtataaattgataaccttactgtgaactaagatcacttggggagctttttgaaaagcctaagagtttgaactttttaaaagctccccagttgatcctgaactgggaaccactcatccatagacttctgttttcaagggaacttgggtactccaacaagaaaatgttgggtggatttggctttcttgccctttctgaacagctgtgccatgggcttatcttggggatgaggccaaatccaaactttctaaagaaatcagtgtgttgtccctttaggtaggccagtgtttctgctttgcctcccagtgaattcatgctgggagttcagatcttgaaaagtgggtggctgctgaaacagctttttttgtggtaggctctgtattcgatgctccacttaccagcacagatgaaattttcatcagatgcaggggagggcgggattaaagctatgggtaatgacataggatagattgctaattttcttgtggtttgtcttgcctttgttccatattgaccaggagttcgtctgagattccagagacgccaaatacgaggtgtggcgtgaaattagctgctacgtctaatagattaggaagaggaaaaggcatatgacattatacggttttttgcctttggaagcagaatttaatggtcattggctgctctgtcaccaaccctcacactaagcacaatacagatttctgctgcagagcaaattgggctgtagctttgcaaagaagcttagttcagggcactggagaattacattttttggtccaagggctttttttgatgaattggagaagagctagttatttgtgtataaacgtttggttgactgctgtttggaggcagcatgctgtatagagaatgtgaaagtctagattccgtgtaaactccaacatcagctaggagatgaccaaatttgtcaccttcatgcttccctttttcccccatctgtaaaatgggtgagcgttgactgtcttgttcctgtccttataagagtagattgttgagaagagaaatctagatggaatattttgtgctttttagaagataagtaataggactgagctggtaaattttttaatgcttaggatttggtgctgcttgtgagcttttcgacagcttactatgtgccagtcttgctggcagcctcgcagctgtgagaaacttggtgagtctggccagggtagttgtgatttctgtggatctgcacctcctaagtccgcaatagtgggaggatgagtttggatttttagcttgttctcttgttttgattggtaggacctggaaatggtgagaaatttcagtcttttgccaaagggtatatgcctttgtcctcattgttgattggagttaattatgggcttctatagtctttgctgtataatttggggcttttgcagtaacctctgggcataattccctttgctattcccaacatctgccttcctacaatcattttagaaggtttaacaattcccacattttagcactaagcaaaacttccttttagttgcttttgagtctggtaagtggacctacctggatatattgtcttcagtgtggtatgagttagcttagagaagtctttttgttttgttttttgttttgaggtggagtcttgctctgtcgcccaggctggagtgcagtggtgcgatcttggcttactgcaacctctgcttcccgggttcaagcgattcttctgcttcagcctccccagtagctgggattacaggggcccaccaccacacccggctcatttttttattttttatttttagtagagctggggttttgccatgtttgccaggttggtcccgaactcctgacctcaggtgatctgcctgccttggcctcccaaagtgctgggattacagtcataagccaccaagtctggccaacttagataactgtttttaagtgaggtaagaaatgggcccaccagttgggtgtggtagtgtgcacctgtagtcccaatacttggaaggcagaggcaggaggattacttgtgcccaggaagttcaagggcacagtaagctatgatgtgccactgcattccagcctgggcaacagagccagactccatcttttttttggggccggggggatggagtctcactctgttgcccatgctggagtgcagtggcccgatcttggctcactacaacctccgcctcccaggttcaagccattctcccgaatagctgggactacaggtacacgccaccacgcctggctaattttttgtattttagtagagacggcgtttcactgtgttgcccaggctggtctcgaactcctgagctcaggcagtccgcccaccgcagtctcccaaagtgctgggattacaggcgtgagccaccacgcccagctgactccatctctttaaaaagaaagaaagaaagaaagaaagaaatgggcccagcaactaatcaggtttctgttctggggaactgggctagggcttataacacacatatgttggaattcaaagagctgggcttgatgcctgtggtcctcagtgtaatctagcattgctatttcaggaaaaccagtggagttcccatgtctgtttctcatatgttgagttgattgccttcctttggatttggtgagagatctaatttgatctgaccattttgaatcatcacgtaatacacacttggttggaaataggtaccttgttcacttttcaagatttgttttttaccaagttaacagatgaggctattactggctgtcttcatggtagtgaggtggagaaatggaggacggttctgtagtggtttcctatctatttatttgggggggaaaaaaacaaaatatagaattctggaaagagaggcaggctgctttggcatccatttggggccctgctgtcgtggacaggcctggcagacgtgagaaacttttttcactgtatccttgggtcttcaggtctaaagggatctttttgagtaatagcatgacatgctgagagcaaaatgattttatggtgtggcgaggaagttctgattttatgtttgggttttgggtccacacactgttgatctttttaactattttttccatgaagtggttgtggttggcagctctcctttagaacgaactcctgggcttaaaaaaaaatctctgtccatttgagtcctgtgcagtgcttctcactccttaacattctctctgccaacatcatttctaaggttttagaccttggaccatgcctcttggcttttccctggaagttccctctataggttctttagttggtttatgatggagttttggatctgaccttgctgcacagatgtctgtgtattggaactaaaaatgaacacatggtttttgtgcctgtagcacatgaacagacactggcttatgacgtgttggaaatggcacaggctggctgacttggcaccgtgtgctttagcaggggcagaggtacattggagccataaaatctggtatttggacatcctagtttggaagttactttagaaaaggacatgtgtaaatcttagggcatcagtacaggagatttatgggcaagataggttattattctttcattgtttttattttaggtttcaaggaatttgaaaaccagccaatggttacatctatgtgttgttgttctgtctagtctaatgcttttaactcctttatcccataaatctgttgcagtacagttaataatttgcagggtagaaatggacagaggcatcctgtttttttgttacctacagcataggcagtaatttagctgacacaaaggactgctggcctcaaagacctttgcctaaggcctgctgccctgtccttttctgtcacctgaagcacagcccaccaaatgctattctttcccaccctactcctccagtctttgttgctgctaagatgaaagtggtctactggcaaagttagaggggtataactttgcaccctaatgctttttgaggtgatctggggaagaataaataacatgggaatgtagtatagagggttagtttaaaatgttatctgaaattcctttattcatattgctctccaaaatatagtgtgtcagcttagaatggccttttatcattccaaatggttcatgtatacaaaaggggatatataaagtgtatgtctttgaataataataaaatacaaatgtaggtacccatcactaaacttaacaaatagaatgttatcagtacctttgaagagtgttgctttctaattacatcttacccctcccccaggtaaccaccatcctcaattttatgtattagtatcttgctttgttgttgtttttttttttttattgtcatctagattggttttttcatgaatgactgccattagaatgctctcaggatccttgagacagatactgctttgggtttgtagttaggcttgtctccccaaagagagaaagaagcatgcatatttattagtagccttttagcctcctagactttagaccttttacctttccaagcatccagccatgaggcccccttatttgccaggaaaaaccattctggcactctcgaacagctctccctggattcagatgtttttctttttctagatcctagaaactatgatttttcttcttcaaaatgccgggggtgggggagaagatgagctgaagtgagaaggcctccgcaagatgtgtgcatttgggtcctgccgttcttcagtgcttggcactgaagagactcgtccccagcatgggcagatggcagagtaatgcagcttcctttgaaaagaggcaaacggccaaatggctgaggtgtgaaccttttgaaaggccagtgcttcaggtttctacttgctgggtttaatgttgtacccacaagttatcaaataaaaatcagcttggaagctcttcagcagtcctaaagttcatgtccagtggaattaacattgcattccattcctctggatttttggaactaagctgcagtcatgagccacttttatgagcggagaaactgtgtggccatatcttatttttatgtagccacctctcctgtgggtgctgtgggtggaatattcatagtgagcgtgatcatcagaaccctcaagtatggaagaggttgccaagggaatgtaaagctaggtcaggagaaagacggaccagggtttcagctctttctgaataagatcttcatggtatggttttagaattttgtttgaggtgaattctgagaagctcagacatcagtgttaaaacataaatgcataaatatcttctgaagtcaaataatttaaaatagaatttcattttggattttctttgcttttgcccctctctattggtgcagtttatagttgaaaagagtttaagttctatttagacctttgggtaagagtatttttggaaggtgagccagctataatgctaggagacaggcactcaattctgcggtaggattttctttaagtctgttttactgttatatatatatatatattatttttttaaaaaaatttttaattaaaaaaaatttttttttgagacaaggtctctgtcacccaggctggaatgcagtggctcaatcatggctcactgcagccttgaccttcccaggttcaggtgaccctcccatctcacactcctgagtaactgggactagaggtgtgcaccaccacgcccagctaatttttatattttttgtagagacgaggtttcatcatgttgcccaggctggtcacgaactcctgggctcaagcaatctgcccacctcagcctctcaaagtgttgggattacaggtgtgagccatcgcaccgggcctgaggtataatttatataccgcaaaatttacccttttaagtgtccagctctattaattttgacaaatttatatatagtcatcataacttctaccataatcagcatgtaacatatttctttttctttttttttttttggggatggagtctcactctgtcacccaggctggagtgcagtggtgtgatcttggttcactgcaaccttcacctcccgggctcaggaaattctcctacctcagcctcctgagtagctgggattacaggtgcatgccaccatgcccagctaatttttgtttagtagagatggagtttcaccatgtttgccaggctggtctcgggctcctgaccttgtgatctgcccaccttggcctcccaaagtgttgggattacaggagtgagccactgtgcccagccagcatatggcatatttctttttttttatttttttatttttattttttattttattttactttattttgagacggagtctcgctctgtcgcccaggctggagtgcagtagtgcgatcttggctcactgcaagctccgcctcctgggttcacgccgttctcctgcctcagcctcccgagtaactgggactacaggcacccgccaccacacccggctaattttttgtatttttagcagagacagggtttcaccgtgttagccaggatggtcttgatctcctgaccttgtgatccgcctgccttggcctcccaaagtgctgggattacaggcatgagccaccgcacccggccagcatataacatatttctattacctcgacaagttcagtaattctgaggtgagtttttttggtttaacacacttctggccgtaatgtctttgttggagtcttttgagtttctttcatttcttgctgaaaagccacttgaaagtgtggtaagaagtgaagttatctttggtatattaaccaaaagatctgggttttcagactggttccctgaaacagcatcaagaagtcatggggagggctgtgtgagtggcagctcagagagacgaatgggccctcttggatgctaggcagagcccctaatctgaggaggcccacttagtagctgatggctttgacccatgccttggggcaattgtgcagaaatcagaggtcttcaaggttgaagactgcacatgcatcctgcagtgctattctcaggtcagaatctgttccttggttcactttgggatgacctatcctataggcaagcccagagggaaactttgctctgagctggtgcctgtccaggttaagagcccttttcttggctcccagatggaaattagctctgcatcagacttccttcctcttgaaatggacttgctaattaccactcaaggtgttttactcttttaatgtactgggtatggtgagctccaaagggatttctcattgctttgtaggttggtgaattctgtagccaaatctatttaaggaattgccttaattatttcattctccccctttattttatgctgtattacaagagtgttgctgacaacgactagggtttgctttatttctcagtgcatctggaactgagtgttgtggtgacttaaatgcatatgtgttcatttctcccctctattctctctctgctttctcactccctaggaaacccaagttgacaagaactcaaagtgccttttctccggtctccttcagccccctgttcacaggtaagggtaatatctttctctcttctgacatctgaaaacaggggcgttctgagacctgttgggaaacacttacagatgcatcacagggagctgtaggcgtgtctgcagttatttccttcattccatgcttagtgggtttggggtgaggctatttttatggtatggaatgtgttcttgactttggatgctttatagttggaggtaaaggctgcttgttggtaattaggtggcctgggtggccctagcagttatgcagtgcttagttcagggtcatcacatataaattaaaactaggaattacaaatttatgggctcacagtgcataaaagactctctagaagtcatacaatttctgtctctgcttccaagggagttcatgggttatctcataaaaatgatccatgattatctggtctatttttaaagacttttttgggcaaaggggattacatgagctcttgtctttttaggggcttgcagttcctgcagctgttagacttctttattgtatctaatttaagtctgccctcttgcagcagggaacacagttgctaaactaggaaggctgtagaatctcctttggatgatgggtaactgccttctcgtttcgtagggagctttttcagagagggagaccttctgttatgtcagtcacaggtgaagctcctgcatgaataagctggagaaaagtggggctttgcccatgtctcagaaactgagtacttctcattggttgtgactgagaagcctttaaaaaaaatcccaatctcaaactcctttggatatcatgtccctcaaaaaggtgattggaagacttacgatttgggaatggatgcttccaggaaaatgttaagcaggccaatgagacttgcagctgggtagactgctgtgaactgtcaaaacaagtgaattggtacctgtataggcatctactgtagtggagaaggaggtctctgttcttacccaagcccagaattaaaaaatcttatcttgcgataccatgtctttctagttaatagttgtttcctcattaaagtaaggaacatggcttggtcacggtcacggtggctcatgcctataatcccagcactttgggaggttgaagtgagcagatcatctgaggtcaggtgtttcagaccagcctggccaacatggtgtgaaaccccgtctctactaaaaatacaaaaaattagctggggcatggtgccgcacgcctgtagtccagctactcgggaggccgaggcaggagaatcgcttgaacccgagaggctgaggttgcagtaagcagagattttgccactgcactccagcctgagcgactgagcctctgtctcaaaaaaaaaaaaggaacaccacctacatttgtagtttgaggttcaggtcagcctcagccctcttgaatgacgtcctttatgttaagtgctctaccaatagtctagactgctctggcctgtcaggaaatacacttgtctggctccatcgcattgctctgggcagccaggctttcagttaccaagctgtatggtgagtctggtaccagctttctagaacttccactgatggcttttgtttatttttgacacagggcctcactttgtctcccaggctggagtgcaatggtgcagtctcagcttactgcagcctcgacctcctaggcccaaacgatcctcccacctcagcctccagaatagctgggactataggcatgcaccaccatacctgaataatttttatatttttgtagagacggggtcttaacgtgttgcccaggctggtcttgaactcctgagtgcaagtgattcgcctaccttggcctcccaaagtgttggaattacaggtgtgacccactgcacctggtctcactgatgacttttagaagagcttttctgtttatcttaattagtattcaagagctttgtaaaaaaactgtgtatttaggttctgaaagcccagtttcctttggtagatattggtcacctcattttcttaacggggaaacatttaaaatactagctgaggggctcattcagccctgaattaaaaaaaaaggtgttggaaggaacaccgtaagggctaaattagagaaatcctgagttctgacttgtgcatcaggcctgccaaaataaccgtattcctggctatcagcttgtgttcatattaataaaatacctttcatcctctcgtgactcaagtggagagggaatagacagagttgggtggcaaggagtattgtatatggcagggaacagaactgcatgacatgctgggaagaagagaggccatgtgcctcctcccaccaagttcctatggagaagctgcctcttagattacctgacttttgtctgactgtgaaagtagttaatttttaggactataaattgtactttcagcctttgtagcctcagctgttaagaacagatatcttattcaggtagattctcttatgtgtgaatactctggaaaatcaagatatggactgccctctaggaagaagttaggactaacattgggaactttatctgcattcagcttaccgtacagttcttaggttttctggcccttgctttccatgtctgtttgggcatataacaagccacttggcttgcttcctaaggcagaaattgatacacaattctgaaaaaataaatggtatgggttctattggataaagaagaccccttgtttgagggtacgttgtaagtcagtggcggaaccagaattagatggtttttccactgtcagtcccatggttttgtcctaaagaatccttgacccttaacagggcaaaggaatgatagaatttaaaaattgacttcctggtgttggggtgatttcagccctgggggcattaggttttgagctttctgagagcagcagacccccagcctcgcctgcttgccctttgcttccctttgctttctgcatcagctttgggcaaggcgcttctgtaacttgcttgctccatgaatccctcaggtgaaactgtgtcgcttgtggatgtggacatttctcagcggggcctgacctctccacaccctccaactccccctcctcctccgagaagaagcctcagcctcctaggtatagtttcttcccctctccaccttcttgcctagtgggagggtgagctccagggacttgttctttgctgggggccgaccacgcttctgggtttccgatgatgactcaattatttcccagctctttctcagcaccccgtcatctccctaagcaattaaatgggtctcacccgcatgctgtaatacttactatacatatattaattcagtttacatttatcttgccttgaacccactgctattgggctgcattaggaatatccttactaccctgctttccaaaagcaaaacagagtaagatgattgttgccctctgtgcaaaaagactgggtgaaggttgggccatcctgccccagagggcagcctgatagtccttctccctctcctctgccttcagcgtgctcattctgtgctcacatttctgaacctcttgcttttgttctctcttctagatgatatcagtgggacgctgcctacatctgtccttgtggctccgatggggtcttccttgcagtctttccccctacctccgcctcctccaccccatgccccaggttagcttagtttagaggcaagacttgtaagagttgggagtacaaagtgatactttctaccatagaaggatgggagaaatctatttatggaaataacagcttagtagaaagtttaaatcttttccccttggctggaccagactccttagaaatgaggcggagaactggttttcctaacccgttttctttatggaggtcaatctgatttttgttagggatgaaagactactgaatttttcatcagtctttgctgctgagactgttttgcaatccttgagtagatatcacttaagaaactgccttaatttcaggatagtgaggtttaatatgttggtggttttcagcattctatggtttttctaagcttttagtatttactgcagccttgtaaataagtaccaagcatttagcagcccatacctgctttgccagcttacagtacccaaggaataaaatgaatgaaatcagcattcttttctacttgcctggcaaaatcattactcttcctgggcaagtaagcgagtcactatttccaaggctgccttatcggcacttcacttcgaggtgggagaagttggaatcgctctaggctggtgaagcccctgaagtagtcaccttagtaaggttagtgagcagctcccctccccctttcttggggtcaagtgcccccacccatccttcacagcttacacaagcccacacagctttttgttccagcccatccagctctttgccactgctttggcttctaccctttccagcttagcttctaatgccttgccctcttcagttagcatcctctgtttttgggggagggtctatttgtggttgggagcagtgagggtaaacaagtgaccaccactgtcttgccctgcagatgcatttccccggattgctcccatccgagcagctgaatccctgcacagccaacccccacagcacctccagtgtcccctctaccggcctgactcgagcagctttgcagccagccttcgagagttggagaaggtaggtggtacctaaggactggcaggtcacttctcctcccattagctaaattctgtattcggacacacctttatttatgtgtttatttatttttagagacagggtctggctctgttgcccaggctagggtgtggtggcataatcatagctcactgtaggctcaaactcctgggccaaaggatccttctgcctcagcctcctgagtagctaggactgcaggcatgcacgaccaagcccagctaaaatttatttatattttttgtagagactggtcttgcagtttcccaggctggtcttgaactcctgggctcaacgtgatcctcttgcctctgcctcccaaagctctaggattataggcgtaagccaccacacccagcccctgtttattgttttcagaggaagaatagtttacttgcttccatatttacagtgacaaaacagtgtgctcctgctattagttccatgagatgtaataaaattgaatttggggaaaaaatttggacatgataaaggttgttggagaaatgttttacatagtctaagctgattttgatagattaactgacccagttccctcttcttttcttggtagggtctttggtaacaaaattgtagaattattattctttgttttttgttgttgttgttgtcttgttttgtttttgagactgagtttcgctcttgttgcccaggctggagtgcagtggcgcaatctcggcttactgaaaactccgcctcctgggttcaagcaattctcctgcctcagtctcctgagtagctggtattacaggcgcccaccaccatgcccagctaattactgtatttttagtagaaatggggtttcaccatgttggccaggctggtcttgaactcctgacctcaggtgagccacctgccttggcctcccaaagtgctgggattacaggtgtgaaccactgcgcccagccattttgttttttgttttttgtttttttgacacagagtctcactgtgtaacccaggctggagtacagtggcgcaataccagctcactgcaacctccacctcctgggttcaagcgattcttctgcctcagcctcctgaatagctgggattacaggcatgtgccaccaaacccagctaatttttgtatttttagtagagatgggttttcaccatgttggccaggctggtctcgaactcctgacctcaagtgatccacccgcctcagcctcccaaagtgttgggattacaggcatgagccacagctcacggccagaattattattctgttactttggagggctaaaagtatagtgagcctgatgttcattgctaatggttgagacacttgtaagtggcttttacctattgaaatattttggagagaatgcagagggttctcccatgttaagatagattgcactgaaaactttgacatttctctgtcctgataactagtggactgcttcttgtctttgatagtgtggttggtattgggggccaatgaattgggaagatgcagagatgaagctgaaagggaaaccagatggttctttcctggtacgagacagttctgatcctcgttacatcctgagcctcagtttccgatcacagggtatcacccaccacactagaatggagcactacagaggtaagagatactggtaagagaggcttcttccccccttgatttgctctacctttgctgtctgacttttttgtggaagagattcataggaatggaactacaaataggggaaaaattatcttagactcagttgaatattgatatgagcgctgatttccgtcactagaagaaatggagggggtagggaagggagagtaagggttccatttaaaagtcttgtcagcagcatcttgtttcctaaataggagggcctgaacaaaactgttggagaggctcccgagaaatgagccggtaaaactctttaggtaaaaggaagaaagaacctaggaccattaggcaaattctcacaagctttgtttgtagttaaacttatcatctagagatattttgttaaatcacgtatacaaagagggtgaatttagtgttgatcctgtaactgttctgttctgaatttctttctttttttttttttgagacagagtctcgctctgttgcctaggctggagtgcagtggtgcgatctcagctcactgcaacctccgcctcctgggttcaagtgattcttctgcctcagcctcctatgtagctgggattacaggcatgtgccaccaggcctggctaatttttgtatttttagtagaaacagtgttttattctgttggccaggctggtctcaaactcctgacctcaggtgatccacccgcctcggcctcccaaagggcttggattacaggtgtgtctgaatttctttgtctgatagtcactttctcccaggcagcatggtgataatttcctctttttgtcaatgttgtagtctcttaggaaatattcattaaaatgttgagagtttgtgggatcaacatgctttagactatctgccattctcctagtggtacctcttcctttgtgatcagatggtacttcatgtgccagtcatgcctagaagccgacttgttaaacacagctctctggattgactttgtatcgagacattctgtatctaacttgggccagaaacttgtgatggtcattgtttctgaggctgggtaatacatcctttgtcaaaatacctgtgtatgctacaaattgaaaaagcatagagaactttggtgtgtttcagggacttgcttcccatccctcacagtcttaccatggtggtcaaccttaagtgaatgctctgagacattgcatctgaggtaagagcctctgtcctgcctcttctcaggccccacagcatcttccccactcagcccacactgcatcgggttctcttgtgaggcaggaagtagctgtttaggtcagcatagctttgtccatggtttcctctgtacccacttctaccttagagataacacgaagagaaaggaacttcaatccaatgacctgggaatgaattagataactaggtgggataggtgagggggactgcctcctgttctgctgtttgtgaaaacaaaaacacacaaggaaaaaaacaaaatgtgaagcggagcatttcagagtgaagtattttgttaaacctgttcaaatgactaggccctgggaattataaataaatacttgacctttaagttcttgataggtgagatgccaggaacaagaggtctttcaaatagttctccgattactttttttttttttttttttgagttggagtctaactttgtcacccaggttggagtacagtggcacgatctcggctcattgcagcctccacctccttggttcaagcaattctttttttgtttgtttttttttttttgagacagagtttcgctctgtcaccaggctggagtgcagtggtgtgatcttggctcactgcaacctccgcttcctgggttcaagcaattctcctgcctcagcctcccatgtagctggtattacaggtgcccgccactatgcccagctaattttttttgtatttttagtagacacagggtttcaccatgttggtgaggctggtcttgaactcctgacctcgtgattcgcccgccttggtctcccaaagtgctgggattacaggcgtgagccaccatgcctggccgggttcaagcaattcttgtaactcaacctcccaagtagctgggattacaggtgtgcaccaccacgcccagctaatttttgcatttttagtagagacagggttttgccacgttggccaggctggtctcgaactcctagcctcacgtgatctgcctgcctcggcttcccaaagtgctgggatgacacgcgtgagccacctcacctggccaccagttactttttgttaaagggactttgcttccttgaataagtagaatttcttttttttgagacggggtctcaccctgctgcccaggttggagtgtagtggtgagatcatgcctcgtcgtagcctcaacctcccaggctcaagtgatcctcctatctcagccttgctagtaggtgggactagtgtgcatcaccatgcccagctaatttaaaaaaatttttttagtagagacagggtctcactatgttgcccaggctggtcttgaactcctggactggagcaattctactgccttggcctcccaaagtgctgggattatagatataagccactgtacctcgcctataaccggaattttttttttttttttgagacagagtcttgctccatcgcccaggctagagtgcaatggcgcgatctcagctcagtgtcaacctctgccttccaggttcgagctattctcctgccttggcctcccaagttgctgggactataggcacccaccaccatgcccagctaatttttgtatttttagtagagacggggtttcaccatattggccaagcttgtctcgaactcctgaccttgtgatccgcctgcctcggcctcccaaagtgttgggattacaagcatgagccacggcgcccggccttataactggaatttttaatggaaaccttgcgggcctttccgttaccagtttgcagtggagcatttgtctttgtcttttttaagtgatactgtaagagtaggtagagagactcaaatctgcagttctcttgactgattagtatcccttttttgtgtttgtttgtttgttttgttttgttttttaaagacagggtctggctctgtgcccaggttggagggcagtgccacgatctcggctcactgcagtctccacctcctgagttaaagcgattctcctgcctcagcctcctgagtagctgggattacagatgggtgcctccatgcccaactttttttttttttttgagacggagtctcgctttgttgcccaggctggagtgcagtggcgcgatctcagctcactgcaagctctgccttttgggttcaggcaattctcctgcctcagcctcctgagtagttcctggacgcgtgccaccacgcccagctaatttttgtatttttagtagagacggggtttcaccatgttggccaggttggccttgaactcctgacctcaggggatctgcccacctcagcctcccaaagtgttgggattactggcgaactcctgacctcaggggatctgcccacctcagcctcccaaagtgttgggattactggcatgaaccaccatgcccggccgggacgggtatttttctgtgttgtccaggttggtcttgaactcctgagctcaagtgacctgctcacctctgcctcccaaagtgctgggattacaggtatgagccactgtgcctggcccttttgtgttttttttttttttttttttttttgtgggtgattcctttggaatctggtgcttcagttttttgagttttttcttgttttatttttttaagtcataggagttcagattcccttttccatttgggattttaaagtttgaggtgggatctttgtaatatgttggcgtggggttttaaagttaaagaaggaaagacttagatttctattttttgcactcaacacgcacttgaatgaatgagacccacaaaactgctgttcctgtctttcctcgactattccatatggtctctaagaagtatatatagttgacccttgaacaacctgggtttgaactgcgcaggtctgcttatacatggattttaaaaagtaaatatattggaaaattttttggagatttgtgacaatttgtaaaatcttacagataaactgtagcctagaaatatcaaaagaattaaaaaggtatgttatgaatgaataaaatatatgtggatactagtctattttaacatttgctaccataaaatatatacaaatctgttataaaaagttaaaactttatcaaaacttatgcacacaaaccgtacatggcaccattcactgttgagagaaatgtagacaaatataaaggtgcagtattaaatcataactgcataaaattaactgttacatactgggtgtactaccgtaatatttcatagccaactaactccctgttactattgtggtgagctcaagtgttgcaagtatccgcttaaaatgttgtgtgacgctagtcatcaccatgtgagtgtttatctctccagctaattgtgtatcacagtaaaaattgatctctcatggttcttgtatagttttcattgtgtttagtgcaatacagtaaaccttgagtaatactatgggacccactagtgccactagtgttgctggaagttcccctaagaggcagagaaaagttagaacattacaagaaaaattgctcagtttgtacatagtttgaggtccacagctgtggttgttcaccatttcaagataagtgaattcagcataaggactgttgtaataaaagaaaaaaggctggatgcggtggctcacacctgtaatcccggcactttgggaggccgaggcgggcggatcacatgaggtcgggagttcgagaccagcctgaccaacatggagaaaccccatctctactaaaaatacaaaattagccgtgtgtggtggcgcatgcctataatcccagctactcaggaggctgaggcaggagaatcgattgaacctgggaggcagaggttgtggtgagccaagatcgtgccattgcactccagcctgggcaacaagagcagaactctgtctcaaaaaaaaaaaagaaaagaaaagaaaagcatacctatagataaatatgatttaataaaagtaaagtcattatatgacaacttaaagcaagaggaaagtgaaaaaactagagctggagaagttaatgccggcaatggatggtttgataattttaggacagtttgacttgaaaaatgtcaagataacagaagacgtagcttctgctgaccaagaggcagcagacaggttcccagacaccatggggaaaatcactgaggagaaaggatatctgcctgaacaggtttttaatgaagatgaaagtgccctattctggggaaaagaaaatgccacaaaggatatttattagtaaggaaaagaagtaagaaccagaatttaaggcaggaaggggtaggctgactctctggttttgtgcaaatgcaattgggttaataatcaggactacctttatctatgaagctacagtcttttggttgtacagcaagaaggcatgcacaatgagaacctttttttctggattggtttcatcagtgctttgtctctggagtaaggaagtaccttgccagtaagggattgcctttaaagctcttttgatattggtcaatgcccctggccacccagaaccccatcagttcaacactgaaggtgtcaaagtggtctgcttgcccccagacgcgacgtcgctaattcagcctttagatcaggtgggtcataaggacctttaacactcattgcacttggtactctatgcaaaggattttaagtgctgtggaagaagacaccgatagaacatcatgaatgtctggaaagattcctccattgaagttgccatagttgaccgggtggagtggctcacgcctgtaatcccagcactttgagaggccaaggtgggtggatcacctgaggtcaggagtttgaggccagcctggccaacatggcgaaaccctgtctctactaaaaatacaaaaattagccaggctggtggcacgcgcctgtgatcccagctacttgggaggctgagggaggagaatcgctccaacttgggaggtggaggttacagtgagccaagattgcttcgctgcactccagcctgggcgaccgagtgagactctgtctcaaaaaaaatgccatagttgttatagaagaaattgtgggccaggtgcagtggctcatgcctgtaatcccagcactttgggaggccaaggcgggcagatcacttgaacctggaagttagagaccagcctgggcaacgtggtgaaaccacatttccacaaaagatacaaaaattagctgggcactgtcatgcgtacctgtagtcccaggtactcgggagggtcaaggctgcagtgaaccgtgatcatgccactgcactccagcctgggcaacagagtgagaccctgtctcaaaagaaaaagttgtgaaagccatcaagcccaaaacaataaattactgctgaagaaaactgtgtccagaaattgtatgtgacttcataggatctgtgacagagccaatcaaggaaatcatgaaagagatatggcaaaaaaagaaggtgaagggtgaaggatttcaagatagggatcttagagaaattcaagaactcatagataccacatcagaggaattaactgaaggtgacttgatggagatgagttcttctgagtcagtgccagatgacgaggaagaagacgtagaagaaacagtgccagaaaacattaatgtcaggcaatctggcagaagggtcgaggttatttgagactgcttttgagttattttagacttggacccttctatgatatgggcactaaaaccaaagcaaatggtagaagaagaattggtaccatatagaaacatttttagagaaatgaaaaagcaaacctgagtgtggaggctcaagcctgtaatcccagcacttgggaggccaaggcaggaggatcacttgaggccaggagttcaagaccagcctgggctggtagcttcagctattcaggaggctagggcaggaggatcacttaaacccagtagttcaaggatgcagtgagctgtgatcatgccactgcactctagcctgggtgatagagtgagaccctgtttctaaaaatagaaaaagcaaaaaaagtcagacaaattataacatttccataaatttataccacatgtgccttcctctcctacttccccttccaccttctctacctcttctacctctgccacccctgagacacccccctcttcctcttcctcttcctcctcagtctatttggtttgaaaacaatgaggatgaaaacctttatgaagatccactttatgatcactttatgatgatccacttccatttaatgaatagtaaatatattttctcttattttcttaatagtgttttcttaatagtattcctttttctagcttaattgtaagaatacagtatataatacatatcacatacaaaatatatgttaaccgactgtttatattattggtaaggctttcagtcaacagtacgttgttagtaaagttttgggggagtcaaatggatttttatatgtggattttttattttggtggggttgaggaggatgttgggccattgggatagggttcatgctcccccccacattattcaagggtcagtttatgtatgtaaattggtcattcctcacttaaaggtcattaataggttcttggaaactgactttaagcaaaatgacgtataacaaaaccaattttttttttttttgagacaaagtttcgctcttattgcccaggctggagtgcaatggtgtgatctcggcttaccgcaacctctacctcctgggttcaagcaattctcctgcctcagcctcccgagtagctgggattacaggcatgtaccaccatgcttggctaattttgtatttttaatagagacgggatttctccatgttggtcaggctggagtaaagaccaaacttctaaataaagaccaaaacacttctaaataaagaccagtattaaacagtgaaatatatgtaaactatacacacatgtaagaaagattaatgaaaataagttaggtaatcatttacccaagtattccagctcaggatcacaaatggccggagcctatcctggcagttcaggatgcaaggcagaacaaccctggacagaacaccattccatcggggtgcatatacccacacacccacactcagactggcacagcttagcatgccatttcaccttacacgcacatctctgggatatgggaggaaaccagcatacccagagaaaacctgtgcagatgtgcaaactccacacagacagtggtcctggccggaaatcaatttttttttcttatcaacgttacaaggaaacaagcatggtggctcacgtttgtaatcccagcacttagggaggccgaggcgagtggatcacttgaggtcaggagttcgaggctagcctgaccaacgtggtgaaaccctgtctctactaaaaatacaaaaattagccaggcgtggtggcaggtgcctgtaatcccagctactcaggagtctgaggcgggagaatcacttgaacccagcaagtggaggttgcagtgagccaagatcacgccactacactccagcctgggtgccagagcaagaccctgtcgcaaaaaaaaaaaaaagttataaggtaacaacactgaacaaaatgttattcaaagacctgcttatatgtgtacacagtcatacactgtttagcaacattttggtcaatgatagactacatatatgacagtcgtcccataagattatattactgtatttttactgtagtttttctatgtttaaatgtgtttaggtacatgaatacttaccattctttagagttgcctccagtattcagcacagtaacatgctatacaggtctgtagcctagcagcaataggctgtaccacatagcctaggtatgtagtaggctacaccatctaggtttggataagtacactctgatgttcgcctaatgatgcatttctctgaacatatttctgtcattaagtaatgcatgactgtacctatacttaatatacataataagtacatctatatagagagaggaagcctgtgatttaaagattaatgttcatactcagtgaacaattttatatcattttttctgatttgaaattattaaaggttgagtatccctaatctgaaatccaaaatgcttaaaaatctgaaactttttgcacactgacatgatgctcaaaggaaatgctcattggagcactttggatttcagagttttggattagtaatgttcaactggtaagtataatgcaaatattccaaaaatatgaaaaaatccaaaatctgaaacacttctggtctcaagcatttcggataaggagtacttagcttgtatttacttaacaaaaaccttgtaagacctaatttatgtcttacaaaaggcaacatctttttacagttaactgtgagataagcaggaacaggtagcttcagagacctttgagccagcttgcccccaaactgccctcccaaaagtgagaatcatagttaaaatattcaaaccagcctctcatgtcttctgaagtaagttttaaaatttttacttcttaattttccatggcaggaaccttcagcctgtggtgtcatcccaagtttgaggaccgctgtcaatctgttgtagagtttattaagagagccattatgcactccaagaatggaaagtttctctatttcttaagatccagggttccaggtaaggctgtacttctgttaattatttaacttaagttgggtatgatccagtttagtgtcaaaaaacaccatccccacaaaaggccatggttaagctttttttccctggctgttggagccaccactcctcttacagagtcccatggttaatcccctgcctttgtacattaatctctcagcatactgaggaggaatctttgcttctctaaccacgtgaatgagaaaactgcttccacctctgatgtccaggcatcatgtgaacatttgacatttggaggtatccctgatctaggcatctcaacatttataagtgaagcagaaagatgagagctctcaggtcctacccataggaacggggaaggtaggagaatgtttaccagaaaggcaggggcgagcgtcagtggggctcagtatggctaggcgtggtggctcatgcctgtaatcccagcactttgagaggccgaggtgggaggattgcttgatcccaggaatttgagaccccatctcttaaaaaaataaaaaattagccaggcatagtggcacatgcctatagttccagctagttgggaggctgaggtgggaggatcacttgagcccaggaggtcgaggcttcagtgagctgtgatcatgccactgcactctagtctgggtgatagagcaaaaccctgtctcccccaaaaaagaaaaagtaagggccaaatccagttgcacattgcactctgttaggaagtatctgctgtgggtttgcccatgttgtactaaacttgctgccgaatagtaaatactttgttttgtatcttgccatccctaccattgatgaatacaagacctctctccatttgggagcactgggcagttgctatccttgctgatgtgattgtatagtcttcctgcccactaagttagggaggtgtctgtataatctgtggagggcaagaggggattgtttggagcaatctgcctttatagtgttgggtaagacaaaatgacacggacattaatatgaggaacttgtaagatgcaaacaacttaagccaggcatggtggctcacactgtaataatcccagtactttgggaggctgagacaggcagattgctcaagtccaggagttcaagaccaggctgggcaacatggtgaaaccatgtctctacaaaatacacaaaaattagccgggtgtgatgccaggcgtctgtagtcccagctacttgggaggctgaggtgggaggatcacttgagcctgggaggcagaggctgcaatgagccaagattacgtcactgcactccagcctgggtgacacagcgagaccctgtctcaaaaaaaaaaaacaaaaaaaaacaaaaaaaaaaaaacaaggcaggggttggtggctcacacctgtaattccagcactttgggaggctgaggcgggcagatcacctgaggtcaggagttcgagacagcctagccaacatagtgaaaccctgtctgtactaagaatacaaaaattagccaggtgtggtggcaggtgccttgtaatcccagctactcaggaggctgaggcgggagaattgcttgaacctaggaagcggaggttgcagtgagctgagattgcgccattgcactccagtctgggcgacagagccagactctttcaaaaaaacaaaaacaacaaaaaagaaacaacttaaaatgagaacttcatgctttcccattgaatcaaattaagattcttgaacagaacacctagaaattgctctaaactgtaggagctcaggggagcctcaggcagaagactaggaacaggttgagccaggtgacaggaatgtttcttgtaatcttggggatttgaataaggcatgacagggtgtgaactgtattaattctcacttcatttagttttgcctcagtgctgtcaacacagttgggtcttgtgcagttgacttgcttaaagggaaaagttagattccttccttataggagttgactctgcttagcagtttttaaagtttatggctttttggggggtttttatttaacaaacatttattttgtaacttaattatcaaaaataagctacctttctgccttcagagaagtcatagtctaaaagaagggacaggaaggaagacaaaggtcagagcacatgttcaagtcagtataaagcatgtggtggtaaccagcaagagtagggtagtcagctctgcctgtggacaagcccgggaaatctcaaagaagattctggactctggaacatcactctatttgtagaatattgagaaaacttcgtggaatattggactcctcagatacagcttatttcattgtacaaatgtaccctgtctgcagatattttaaccaagattcttagcattgtattaagggctagagtgtgtagtgtttgcaactattaatattgagtgcctgttagatgccaggtacttggccaggctctttatttaaatatattgacatttttacaacaacctcaaagttaggtaatatagatcaatctattaaaataatatggctgggctcggtggctcacgcctgtaatcccatcactttgggagtccgaggtgggtggatcacctgaggtcaggagtttgagaccagcctgaccaacgtggtgaaacctcgcctctactaaaaatacaaaattagccaggtgtggtggtgcacgcctgtaatcctagctactctggaggctgaggcaggagaatcgcttaaaacccaggaggctgaggttgcagtgagctgagattgtgccactacactctagcctgggcccccaagcaagactctgtctcaaaaaaaaaaaaataataataataatgataatgatgtgtccaacatggtgaaaccacacctctactaaaaatacaaaaattagccaggcatggtggcgggcacctgtagtcccagctacctgggaggctgaggcaggagaatcacttgaacctgggaggtggaggttgcagtcagccaagattaagccactgcacttcagtctgggtgacagagggagactctgtctccaaaaaataaaaataaaataaatttaaaaataaaataatacatgagacttcattttgccagtgaggaaactgaggctgaagctcaaaagttaagttacttactctaaaggtaactcggttgatcagtgctgaagccagaattcaaacctgggcttgactacaaatccttgactttatttcccaccggtctgttattggaagaggtagtagtaatcagattgaaagtttgctggcatttgtggaaactacctaaagaaggtagaaccatgtttactgggggcaggagggtgcacatgctccagttgaatatctgtgtatacttaaaattgtaatcaagttgagagggcaaagcagagctattgcccctcgaccctaagtgacctctctttgaaggatagggccaaagaagacaaagcctttaccactgtttgctgccctcttttgcttataaaggggaaggcattatataagcttgattttattagaggagactattagggtgaggaagaggtaggtattagcatttaggttgagctctgtcagtctgcgtcagggattttaacttgatcgattcagaaaggaggctgtgtgttcagactttggaatgatgacaactgaacacctacaaggagccaggtgttattccatttaaccaagtgttaccctttgaggggatagtaccgtctcctttttattttttttctttttgaaaaagcaaaagaaactgaggtccagtgagttgcagaaccaggatgagatctcaggtttttctggctcagatcccagagctggatgcagtaggagggtgttaagactggtatcaggcttggcgcagtggctcacgcctgtaatcccagcactttgggaggccaaggtgggcggattgcctgagctcaggagttcaagaccaccctgggcaatatggtgaaaccccatctctactaaaatacaaaaaattagttgggcatggtggtgcacatctgtagtcctagctatttaggaggctgaggcatgagaattgcttgagccccagaattggagattgcagtgagccaagtcataccactgcactccaaagactctgtctcaaaaaaaaaaaaaaaaaaaaaaaaaaaacctaaaaaaactaaacccctaacaccagacagcagtgagagtgtgactgatgtcacacaaaacctctgatcctattagagccaggctaaaagcaaacataccctttttaattgagagaatcttcatctgtaaagttcgtgaagaaaaaaatatctttaaaaaatcatgctttgatcaggcttggtggctcacatctgtaatcccagcactttgggaggtagaggtggaaggattgtttgagcccaagagttctaactagcctggataatgtagagagacctcatctctacaaaaacaaaacaaaacaaaaaagcctagccacatgtgatggtgtgtgcctttggtcccagctgcttgggaggctgaggtaggaggatctcttaggccgggtaggtcaaggctgcagtgagctgtgattgcaccaccacactccagcctgagtaatagagcgagaccctatctcaaaaaaaaaaaaaaaaaaaaaaaatcatgctttgaattggacagctcatttttgtttgtttgtttcaagatggagtctaccccagtcacccaggctggagtgcaatggcacgatctcggctcactgcaacctcctccgcctcccgagttcaaacgattctccttcctcagcctcccgagtagctgggattacaggcgcccgccaccacgcccagctaatttttgtatttttagtagagacggggtttcaccatgttggccaggctgcccttaaactcttgacctcatggtccacctgcctcaacctcccaaagtgctgagattacaggcgtgagccaccacgcttggcggaattggacagctctttaaggaaattggttacttcctcttttgtaacccttgttaagtttataattacttgttcagtgacatgtcttccctgtttaccagggtttctcagctctgcattattgacattttaggctggacagttttttgttgtggggtctgtcccgtgtattggaggaagccctagcttttgcccactagatgccaggagcactcacccccaccccaagctgtgacaatcacattatgtctccatatgtccctgggggccaaaatcatccccagttgggaaacattgttatataccataggggttaaaaagtacaagttctggatccagagcaccgagtgctaccccaggtcctgccagttactagctctgtgatcttaggcatgaactgaacctctcttgcctcagtttcctcaacagtaaaatggggatgattatagtacctcacttatagggttgttttgaggaatgcaagagttaactcatgtaaaatatttaagacaatgcctgacacagagtaagcactcaacagatgttacttttctcagtgctctctaagatgtaggtgcataggaagtgtttaaggtggtatctctggtgttctcctggccctataaaggtggtacccaagataatatgtgttgaatgatactctgggtggcccctcagatatccttgtgatatcctttgagatgccctttgtcgttattttatcttacctgtctgattgccaggtcatccagagcaagaactgtctttccttagctctatattattttgagatgaagtctcactttgttatgcccaggctggagtgcagtggcgcaatctcggctcatcgcaacctctgcctcctgggttcaagcaattctcctgagtagctgggattataggcgcccaccatcacgcccggctaaatttttgtattttttagagacggggtttcaccatattggtcaggctggtctcgaactcctgaccttaggtgatccacccgcctcggcctcccaaagtgctgggattacaggggtgagccaccgcgcccagcctgctctatattattttgtatattagaacactcaaacatttgctgatgagatattagacatactcagaagaggttatttcacttacgcttgtgaaagaagccaggagtcctttcctggggatttgtgaccagtgtctctgagcatctccccagtaagcggttcgtccttgttttataggtacagagtcatgccactgatggggctcccctccttgctctggctgcatgaccccctttagcaacaccgtaagactcccttgaggatatttgcaaactagacttattcctggcttattacctgctttatgtttatttgtatggtgtgcagaatggtgtaataaaccctgtgtatccatcacccagccccagcaaccatcagcccatggccactcctgccctgtttgtatacctgtccacttcttcattgcatattagtgtttagtgtttaaatatacttttgttttgttttgttttgttttgagacagggtctcactctgtcactcaggctggagtacagtagtgcaatcatgccttgacctcccaggctcaagtgatcctcccacctcagcctcccaagtagctaggactacaggcatgggccaccatgctcggctaatttttcaatttttttgttgagacaaggtgtttctatgttgcacaggctggtcatgaactcctgggctcaagtgatcttcccttcttagcctcccaaagtgttgagattacaggtgtgaaccaccatgcccagcttcttttttttttctttgagatggagtctccctctgtcacccaggctggagtgcagtggtgcgatctcggctcactgccaccatccacatcccgggttcaagtgattctcctgcctcagcctcctgagtagctgggattacaggcacacaccaccacacctggctaattttttaatttttagtagaggcagggttttaccatgttggtcaggcttgtcttgaactcctgactttgtgatccacccgcctcagcctcccaaagtgctgggattacaggcgtgagccactgcacccagctcttttttttttttttttttttttttgacggagttttgctcttattgtccaggctagagtgcagtggcgcaatctcagctcactgcaacctccgccttccggttttgagcaattctcctgcctcagcctcccaagttgctgggattacaggcatccgccaccacgcccagctaattttttgtatttttagtagagacggggtttcatcatgttggtcaggttggtcttgaactgctgacctcgtgatccacccgcctcagcctcccaaagtactgggattacaggtgtgagccaccgtgcccagcagcacttcttttttaatttgtagttttcttcctccatttctttttccctttttttcttgcaatttatatatttaaaatattgttatgtttggagtttacctattgcttctccatgacgttgtttaatatgttcctctgtactctgaatttcctgtaaaatggtaattgaattcaaaggcttacccaatttggattcgttggggagggggagcagcgtgacagcattacttcatctgaatttcttttctttctttttttttttttttaaatagaaaaccacaaaaatcatatgcatggtttaatattattataaggtgaacaccactcaggcaaaggaaccaaaacttttccagccactccagaaatccttccgtgtgccccatactaatctctacacctgtctttataataatcacttcctttcatttttccatgaatgcttttatcaccccagtgtatatccctgaacactatagtttgatattgctcatttgaaaaaaatttcatgtcttttaaatatcttaatctgtggctttttctttcatttccttacgatttacttattgaataattgggctgtttgacctggaaaatttccttggattttactaattacgtactcttgttggagtttagcatgttgtcctgtcttctgtatttcttacaaattagcaggagtctgattcaaactcaggcttgactgaacatataatagtagctcatgcctaaaatcccagcactttgggaggtgaggcaggaggatcgcttatacccaggagttcaagacctgcctgggcagcatggtaagaccctgtctctaccaaaaaaataaattaaaaactagccgaggccaggcgcggtggctcaggcctgtaatcccagcactttgggaggccgaggcaggtggctcacctgaggtcaagagtttgagaccagcctgaccaacatggggaaaccctgtctcactaaaaatataaaaattagccaggcatggtggcccagacctgtaatcccagctacttgggaggctgaggcaggagaatggcctgaacccaggaggcggaggttgcaatgagccaagattgtgccactgcacttcagcctgggcaaaagagggaggctgtgtctcaaaaaaaaaaaaaaaaaaaaaaaaattagccaggtggccgaggcagggtaatcgcttgagtctgtgatgtcaaggccacagtgagctgtgttcatgccactgcactccagcctgggtgacagagtgagactgtatctcagaaacaaacaaaaaaactgaggcttgatccttttagcaagattatataggtagtatttggcatgcccataggaaacacatgatgtctggttgtgtctctttttgtgatcttagcagctgttcattgggagttgcaaaatgatgatactctaattttatcactttttatttattagatggaatagttttatagagacatttctcctcatttattatttaccaaattcatatagaaaaagcaggataaatgcttgactctttttctttatttactaattttcaagataacgaattggttccctatcatcctttgaaggtgaccatttgaaaaatataattaatggccgggcacagtggctcatgcctgtaatcccagcactttgggaggctgaggtgggcggatcatgaggtcaggagattgagaccatcctggctaacacggtgaaaccccgtctctactaaaaaatagaaaaaattagctgggcgtggtggtgggcacctatagtcccagctactcgggcagctgaggcaggagaatggtgtgaatcgggaggcagagcttgcagtgagctatcgcgccactgcatttcagcctgggcgacagagcgagactcttatcttaaaaaaaaaaaaaaaaaaaaatatatatatatatatatatatatatgtatgtatatatatatatatatatgattaattcagccaggtgcagtgactcacgcctgtaatcccagcattttgggaggccgaggcagttggatcacctgaggtcaggagttaaacaccagcctggccaacatagctaaaccccatcctctactaaaaatacaaaaaaaatagccgggcgtggtggtgggcacctgtaatcccagctacttgggaggctggggcaggagaatcacttgaacctgggaagtggagattacagtgagccgagatcaccccactgcactccagcctgggtgacagagagactctgtctcaaaaaaatatatacatatatacacaatatatagtatatatatacacaatacataatatatatacacaatatattgtatatattatatacacaatatatagtatatatatacacaatacataatatatatacacaatatattgtatatattatatacacaatatattgtatattatatatacaatatattgtatattatatacactatatattgtatatattatactatatattttatatatttatatatttatattatacatattatatatatactatatattatatacatataaaattcatggaattaaacatacttaatggctttctttttttttttttttgagacagagtctcactctgtcacccaggctagagtgcagtggcgtgatcttggctcactgcaacctccgactcccgggttcaagcgattctcctgccccagcctcccatgtagctgggattacaggcacgtgccactacacctggctaatttttttgtatttttagtagagacgggatttcgccatgttggccaggctggtctcgaactcctgacctcaggtgatccaactgcattggcctcccaaagtgctaggattataggcataggtgtgaaccaccgtgcctggcccacttaatggcttttaattcattacagttataattattgaagctcgtattgtctcacctttaaccagcagaaggctcttcatgtcggggtatttttccctctctccctcccttccttccttgcttttatctaacagctttattgagatataattcacataacatgaaattcacccatttaaaatgtgtgattcaaggccaaagaaggtagattacttgagcctaggggttcaagtccagcctggacaacatggcatgaaaccccatcttgataaaaaaaaaaaatacaaaaattagctaggagcggtggtgagcacgtgtagtcccagctactcaggaggctgaggcaggagaattgcttgaacccaggaggcagaggttgcagtaagctgagatcacaccactgtacttcatcctgggtgaagacagaacaagactgtgtctcaagaaaaaaaaatactgtgcaattcagtggtttttagtatattcacagagttgtacaacaatcaccacaatcaattttagaatgttttcatcacaccaaaatgaaaacctcagactattagcagttactccgtattccctctacttcctggcccctaccaaccactaatctgttttccgtttctatggatttgactgtttggtacatttcacataaatggaatcatacaatatttttatgtcttgtttcttttacttagcataatgttttcaaagttcaccagtgttgtagcatctgtcagcacagcattcttttttatgactgaataacattccactctggatgtaccacattttgtttctccattctttaggttgtttccagtttttggctattatgaaataaataatgcttctttgaacattcatgtacagctgtttatgtgaatatcttttcaattctcttggatatattcctaggcgtgaaattgctgggtcatatggtaatcccatatttaaccccatgccagactcccaaaacaattgcacccaagattttgttattgtccatctttttgaatatagccatcctagtgagtatgaagtggtagctcattgtggttttgatttgcatttccctaatgactaatgatgttaacatcttttcatctgcttattggctattgtatctctattcacaacctttgctcattttataattgagctatttgtcttcttattgagttatgagttctttacaggctgggtatggtgcctataagcccagtacttagggaggccagggcaggaggattgcttgagcccaggagctcaagacctgcctgggcaatacagggagacactgtctctacaaaaaatttaaaaattagcccagtgtggtggtgcatgtctgtagtcctagctacttggaagactgagatgggaggattgcttgagtccaggaggtggaggttgcagtgaaccgagatcacgccactgcactccagcttttattttatctcaaaaaataaagttctttatatattctggatacaagtcccttgtcagatataaattacaaatattttctcccattctgtgggttgtctttttactttcttgatggtattctttgaagcatgaaggattttgatgagttcctattccaacttttttttttttttttgcttgttatatttagaaaagtttgcctaaccaaaggtgatggagcttaatgcctatattttcttctaggagacttaaacttttagcttttacattaggtctactatccgttttgagttaatttttgttttttaatttttttgtttggtgtgtatgtgtgtacatatatatatatatgtacatatatatatatacacatatagagagagagagagagagagagtgagagagagagagacagagtctctctctgtcaccgaggctggagtgcagtggcacgatcgtggctcactgcaacctccgcctcctggccttaagtgatcctcccacctcagcctctcaaagttctgggattacaggtgtgagccaccgtacccagccttgaatttttgtgtatggcatgagaaaggagtccaactttattctttttcatgtgaatattcagttgttctagcgccatttgttgaaaagatactctttccccattgaattgtcttggcatctttgttgaaatcagttgattgtaactgtgaaggttaatttccggactcagttctattccattgagttgtatgtccatccttatgccattactgtcttgattcctatagttttgtagtactttttgagatggaaaagtgtgagtctccaactttgttgtttttcaagttggttttgactattttgggtctcttgcatttccatatgaattttaggatcagattgtcaatttctgcaaagaagcctactgagattttaatacccccatgttggcaagagtgtggagttgagtcagtacatcaatttggggagggaatattggcatgtcaacaatattatgtcttctgatccatggacataggctgtctttctgcttatttaggtctttttaaaaactctttgaacaatgttttatattttttcttttgttcgttttccttccttccttccttccttccttccttccttccttccttccttccttccttctctttctttctgtctttttttttttttttgtcccactgtcacccagtctggagtgcagtggtgcctggctcactaactacaacctccacctccctggcccagtgtgtcctgcacttcagcctcctgtgtagctgggactataggcacacacaaccatgcccagctgatctttatatttttagtagagatggggtctcaccgcattgcccaggctggtttctaaccctttggctcaagccatccaccttgcctcagcctcccaaagtgctgggattataggtatgagccactgtgcctggcccatattttttcataatataagttttgtatttcttttgttaaatttattttttagtatttgtttttgatcctattgtaaattgttttcttaattttaattatttttggattgtttatagctagagtatagaaatttaattgctttttgcacattcatgttatatcctgtaaacttgcataactcatttattagttctattatgtatttctttttaaattgtgaaataacatgtatgtggtaaaaaggtcaaatagtgcgcaagggaatataaggaaaagtgaatcttctgccctctcacccctgctcccactaagctaaactattgtttagtttttcttaagctgtttcaagctgaagaaaggagtgggatattaaaaaacagtgcttcactgttagctgaatatcttttttttagacagggtcttaccctatcactcaggctggagtgcagtggtacaatcatagctcactgcagcctcagccttctgggcttaagcagtcctcccacttaagcctcctgagtagctgggaccactgttgtgcaccacaatgcctggctaatttttttaattttaatttttgtagaggtaaggtctccctccctatgttgcccaggccaatcttgaactcctgggctcaagcagtcctcccacctcagcctcccaaggtgctgggattacaggcgtgagccaccgcactgggccttcttttacttttgaccttgtgcttgtttttttcttcttggaggattacatataagtcaactagactccctagtttattctctttttacttacactgttaagaaaatgagatctggaatgtgaaacagatgtgattccttatctgattctgtcttcaggggtcagaaaaacctttggtgtggcagaaagacatgggtatttgggtgtttatacctggaagagatttcttacccctaacatggtctttgttgggagaaacgaaaaatagtgcatggctagaaactaggtttgtgcccaggacctctggcatgaggactggaagaaagttactgacgattaatgttcgacttcacccttactcttttagtcccagttgggtcttatcctggattcttcacatttttaactgcttctgttagcatgctctaaatgtgagagttctaattgtttgttggcgtttgtgggcaaacagtaaatggtcagattaataccagggaatatcagaaaattaacaggtttcaaattgctatttgtaaacctaaaggctaaaagtaatacaattaaataggcaagtatatgtggtcattaaaattcaagtaggcaaacaatcagataattgtatgttgcatattatcctgatctctttaagcacagtgttatctttgggaataaattattagatgtataaattacttttatctctgaaacatcatgttgagtttaccagtattacagccaatcccccaaagctttctgtttgccacagtttaatttactaaagaatatataaataccagtgagggacaggacaaattcaaagaggcatttgaacccaaaattatttcttaaaaccacttgagttaaatatattcaggtgagaaattcacgtgtgagttctttttcttttcttttaatggagaggaccagccatgtgggtagaggagagaagtagggcttcaaaatacaagacttagttttgaaggggtgggagtgccagggaggggactaggagaggctggtcatgaaccagagtgctgtgactgtcctggacaacctccctgttagatgggcagaggtgcaggcactctagagaccctcctggagaaccctgctgagaggttcctcggctatggcagagctaccgataattcttccttagggcaggtgttcaaggcaggccggctttagtggctccatgccacagcaagttctctaagctcagtgggcctcagtttctttatatgtgaaatggggatggtggtgtttgcctcaaagtatagttttaaagactaaataagttatcattattatttttgttttttttttagagacagggtcatactttgtcacctaggctggagtgcagcggcacaatcttggctcactgtagcctcgagttcctggcctcaagtgatcttatctccttggtctcccaaagtactaggattataggcgtgtgccactgcacccagcctgagttaaatgtttttaagatgagcttaacttgttcagtaacaataaaataatgtattttgattttttttttcccctggaaagtatgttgtcagtgatcatggaaaggccttgggatgcggtgtacatgctttcatttgttttgttttcatgccttcaaataaaattttaaaactatctgggccgggcatggtggctcatgcctataatcccagcactttgggaggctgaggcaggtggatcacctgaggtcaggagttcgaaactagactagccaacatggtgaaaccccgtctctactaaaaatacaaatattagctgggtgtggtggcgggcgcctgtaatcccagctactcgagaggctaaggcaggagaatcgcttgaacctaggagttggagcttgcagtgagtcaaaatcgcgccactgcactccagcctgggtgacaagagcaagactctgtcttaaaaaaacaaacaaacactttgggaggctgaggtgggcggatcacaaggtcaggagatcaagaccatcctggttaacacagtgaaaccccgtccctactgaaaatacaaaaaattagcccggcgtggtggtgggtgcctgtaatcccagctactcgggaggctgaggcaggagaatggcatgaacccgggaggcagagcttgtagtgagccgagatcgcgccactgcaccccagcctgggcgacagagcaagactccgcctcaaaaaacaaacaaacaaacaaaaaaactatttgaacttaaaccccaataatagtagatattttattttccaatcagttgtgtctatagaatgtcttttgatatgacaatggctgagaattctttgacaggttttgcaactcagattttctcaaagaatcttgtttaccttccatagcccctttgtttattgaaagcaaaatattcttagttcccttgaatcccagtgttcctgccattctggatgtctccatgctgtggcgtggggccctttttggggtgggattccccagcacagagcctgctaatacataagggtgtggtactcccattgagtctatttggcatcaatcagcaggcgggtttgcactgagcggtactaatcctagcttgcccaagcgattgtagttgttcttttaaaagcatcatctttttttggtctcctggcctaaaatttcagaagcaggaactgggggttatgggggttgggtataaaaggtagctaaacctgattatcctggcttgaaataatggcaggaataataggcttgttaactttgatcctagctgttaccttctacttaccagcctccctgctgaaccagcctctctgctgaaccagcctctgctgaaccaattggaatttggtggggactcctctgaacggcttttctgggtcctcaccttcaggatactgctagatgtgcccaacaagtatctcccattcccagcagggatacttttgattcttggccttcccgagagcctcaggcctgggattggccacttgggtccaagcagtgtctctagtttggcataattgggctactccgaggagcaggactctcagctgttatgagtgatgctaggagccaggcacagtggctcacgcctgtaatcctagcactttgggaggctgaggcgagtggattgcttgagcccaggagttcgagactagcctgggcaacatggggaaaccccgtctctactaaaaatacaaaaattatctgggtacgatggcatgcatctgtggtcccagctactcaggaggctgaggcgggaggattgcttgagtctgggaggtcaaggctgcagtgagctgagactgggccactgcactccagcctgggtgacagaacgagaccctgtctcaaaaaacaaaacaaaagacacacaaaaaagtgatgctagggaggcctttggcagagaatggatttccttaattgtgaatgtggtggtggtgcttctggaaatggaaatcaacagcactttgtggaggggcttttgcacagaatacatatatgaaccataaagaagtcccatttcccctccctaggttctcttcatacaagaaatggtagttagctccattgtttcctctgaatactttcctttgttttctttcttgaaggactgccaccaactcctgtccagctgctctatccagtgtcccgattcagcaatgtcaaatccctccagcacctttgcagattccggatacgacagctcgtcaggatagatcacatcccagatctcccactgcctaagtacaatggggttgtcaggtttgggacaggaatgagtaagggggttgtggggaggtaacaatgtcagtgaggcctgcaagctaccttcacaggcagagtctggcataaaatatttgcagatgtcattcttacacatttcctgtgtcttagcacctaactctagaactgtcatattgcagccagagggaggaaggtgtgtgtgtcagccttccttctgcagtctctaggaagaatagagtagaagtggtaagagtaaggaagacagaactataataactgagaaaatggggattgtgttaggtctcaaccatgtagggagtgaagaagagttgaacaaaggagttacttcttttatattttgtataaaaaccttttgtgtatatccgtcatttgtttttcacagacctctgatctcttatatccgaaagttctactactatgatcctcaggaagaggtatacctgtctctaaaggaagcgcagctcatttccaaacagaagcaagaggtggaaccctccacgtagcgaggggctccctgctggtcaccaccaagggtatgagctctctgcctcactgcccagccacatttcttcctgggcagtcatcatcatgcattgagccttgggccccctccccacaactcccaacatggatagccccgatccaggcatttgcccatagaatgacaagatctgaccgtggagtcctcaaggggcacacaccccatttgggagaaaagcagacagacgagaaagacaagaaagtagattgccaggaaacgtgcaagctaatcactgaatgtgagcaaggagggggacacccaagtgtagctaagagtgcggcctctggcaaggagagggtaattgaaaaaaataagaagaagagtgcagcctcctctcatacagacttgggctgatctccctgatactgcacaaatggcatataaagcaggaagctaaagggaaaggaaacttcatcaaagagaatgcaaacatgcctttaattgcaacaggcatgcacttcagtgagactccaccatgtcccacagcttggaatatggggatgaggaaaaacagcccactcttctatttagcgttccatttgggccattacaaagtaaattgttgaaactaaggaattcatttatctacgaggctcttctcccatcattacacagttctacccatttattttcccataaaacatcttgcaatactggtttgtgcagatgaattccaattagtcttttaaattgcactaaagtgaacattgtggggccaagttcctgagtagggaacacaattgccagggagccatgactttggtggtggtggtgacaagcaagattgactgccagtgtgcagtgactgctttcttctggtgtggatcctggagtagatgtacagtctcatcatgtcttcaattatatgcaaattgtatgcctttggaaatgactaaatatctaatgtcttgtgtctaggtggatttctctgcatgatggctttgcagttgagattagggtgagaggtagagcactagggaggtccacctacctgactacccttgaagagtaattaggccattcagttagaggaccacgtctgtgggtgcagtgctgtagaagaacccatataaacagggagcatgttcagagaaaggccttgtggcattggagagctcaaacttcatcatatgggaataaatggcctagaaagaaatgtgattaacccagagcacggaggttttagggagggatagctgaaagatgcatttgatgggttttcctaaggaagagagtgattaacctcctctctgtggttccagtggggagcaagttcagcattacgcttattctttgccacaggcaacaatcctgatgtcacagcaaaaagagatcctgagagttcagttcaaacctttgccagtgcatgactgctcccaacactcaagacaagtggctccctgccggcctgttcctgatcatgccacacctttcccagttgaggcagggcctttatacctctaggtccccttgcccagaatgctctgccccaaggccctcccatgtcacagcaaaaagagacatggataaggaccaaaatgaatgtaagttacaaggaactagatttcagtccaactttacaagaacctttttaacagagaggtccaaaactgggatggttttcctcaagagcttccattcagcagatagctgtatatttgtgtttatttggcacccagtatgaattgagaatagagtgctgagcaaagcaaaggccctgttttcactcagcttcccttctcctaaggaaagacaggcagcaaacatgaacataaatgaatgggctaatttcaggtgactgtacagtgttgtgaggaaagtaaaactgggtaaagtttagtgattagtggtgggatactcctcaagtttagatggtcagggagagacttgtgaggaggtgccatttcagccgatacccaaatatcaaggagccagccatgggagtgccttggagcagagcattctgggcaaggggacctagaggtataaaggccctgcctcagctgggaaggacgtggcatgatcaggaacaggccagtgggtagccatttgtcttgagtgttgggggcagtcatatattggcgaaggtttgaactgaactcccaggatccctttttgctgtgacatcagtattgatgcctgtgacaaagagtaagcgtaatgctgaacttgctcctggtgtagaccctaggagccctggaaagggaggaagtaacacttcccaagggaaaggtcttttttttttttttttttgagatggagtttcgctcttgttgcccgggctggagtgcaatggcgtgatcttggctcactgcaacctccatctcccgggttcaagcaattctcccacctcagcctcccagtgggaggctgggattacaggtgtgcaccaccacgcctggctaattttgtatttttagtagactgggtttcaccacgtttgtcagttgggtctcaaactcctgacctcactcaagtgatccacccaccttggcctcccaaagttctgggattacaggcatgagccactgtgccccattgggaaaggtctttagggtatgaaatttggcctttatgacttcttgttgttcaggctgattttaatttgggagttctgaatggcctgcttggtctatgtgtgctgttacctggggaatttcatgccagggggtttggagtcagactatagagtaatggctagaacagtgcctgtctcaagtcggaaggtggaagcaacagtggcctttgtgtttctgtgtcaaccctgtccagttgacagaagctgcagaaatacagagctctctggccaggtgtgatggttcacgtctgtaatcccagcagtttgggaggccaaggcgggctcatcacgaggtcaggagtttgagaccagcctggccaacatggtgaaaccctgtctctactaaaaatacaaaattagccaggcatggtggcgcatgcctgtaatcccagctacttgggaggctgagacaggagaatcttgaacccaggaagtggagattgcagtgagccaagatcatgcctttgcactccagcctgggtgacagagcgagactccgtctcaaaaaaaaaaaaaaaaaagaaagaaagaaatatagagctctttcttgccaggttcaaaaggggttactccaggggcttacttcccttttcagtccctagagcaattgagcctcagggaaaaaatgggtaggaaatgaaggggtaagggaaagggaaagagagaatttatgcaatgtggtaggatgtatttattagttatttcaggaccttgttttgtcatccaagtcataggctgctcaggtccccctgacaaaggccactgctgcatccctagtcacatgtggccctcatggaagcgttcagctctccaggctccgttctccttttgaggtgtgctgctccacctccagtggctggctgttatttcactccattttggttctattctgttgaactgttttaattttttttccttttctacctaggcatttggttgccaagctccagctttgaagaaccaaattaagctaccatgaaaagaagaggaaaagtgagggaacaggaaggttgggattctctgtgcagagactttggttccccacgcagccctggggcttggaagaagcacatgaccgtactctgcgtggggctccacctcacacccacccctgggcatcttaggactggaggggctccttggaaaactggaagaagtctcaacactgtttctttttcagaagttttgtttttgatatttatattacttggtatggaaaactcaccttgaaggcagttggggtttgtgcccgttggattgaaagtggtgcgaagggtgagcaggtccaaagaaggggtgggaggagggaacaggggacggccattcagctggtgccaaaggcagagttagagtctgtgctgtgggcctggaagatgggaggaggggcttgaggtttgcaaaggactgggagttcctgaggaagggggaatctgcctcttgttgccatgggcagctgttgtaggagcaggagagaaaggagggtgggtggtctcgaaaagaatattgggcaaaacctagccaattggccttagctgggagaagtagtgactcctgcatccttttttaaggtttaggaacctgagttcagaaacacctctcatggaagctgtactagttgtgatttacttaattccttaagttccatgacctgaagttaaccccgttcttcctctgctctcaacccattgccccttgagataactgtacatgtcactctgatcatggtaacagcatccctattgcttctgccagctgtcatggcaatcgtgtttcccatcacctgggcggttcagagccagtcatgggctgctgaatttaatggagcatgtttccaggttcttcatggcaaactgtactcatgacttaggagtgagtgttacttccatgtgcctgtcagcttgtgagggggaatgtggaggaaggtgagaaatacagctcccacagttgtgctcttcctagaggaagctctcagaacgcagccctcacgggatttccttaggtcagaggagagcatcgcatctcacgtttttaggtttatcactgccatcccacttctgggatgggaggtagcaagggcttctgtattttcttgtgttcattctagcaacccagacatttccggatcagatcctgctggtctccactcactggaaagtctgccagatgccgatttgagagctgcctgtccctgctttcaggaggagcggggagaaaaactccaatggtctttaatggtttctgcagctggccatggccaattcatatgacattgtgagtttgctttcttatagagctgctctggggagaggtttgctattgagatgtaacagtggagctgttgggtcttcatgactcctttgcgtgtgttccatgggactctctttctgggttccccatgcttatagttgcctcgtgtcacaagacagatactaatgtcaggtttgtggcttcctgatggtttgggtggggccccagtgtcctggtaatttataggactgcctcatctgggagcattgccttcttccttagtcccacgtggagtgaccagtcttcctccttgtagctgaacagggaggaaacttgcaccattacctgactgtggaagggtggcccacaagatgagctgtgcaccataaacacagcccacctctgatttgtcatgtggtacctcttctttccttggcttccatggtagtattatcaactaagcaagattgtgatcccagaaattggcttagcatgtgagtgttgcctcgtgagagtacaagtaatataactcgccatcttgcaggaagtgccaccccaatatagagcctgaagttggaatctgttgagatccttgggtggctgatatacagcctgggatctttcttttttttgttccttttcaaccacccataattttaatattattttttagtgtgtgtgtgcctggctttgcgctagatattgtagaaaacaaaaaaggtaaaagacgtaatatgtggcctaagggagcttttaggtgactgctgcacatcaagcagaaaatcaaggactatctaaagacgtttatagtagataagatcagggtagaccagatggtctgggaaagttctgtgcctctgaggctttgggttgtagtcaatggcaggacagacagtgagatgaaaaacacatgagcaaaagcaaggaagcagaaatctgcatggcatgtactgaacagtgcacagccctgttagagcaacatggttaaagaatcctttccagtgcggttttctagatggaagcttcccagccaccaggcagacctgagtgccaaggggttatgatggtgaggtggagcccaaagcccaaaggagtcagcaaggctcctgcccattgccagggcctcactatggtcagctcaggccatgtgagggaggcagagcctctgcaccccctgtgttactggggtttcttctggagaactcatacattcaggtacaaaacaaaccaactgaggaggtgtgacccaacctcaccacccacctttctcctcctggggagtgtcgtgttgaactgtgtctgtgtcagtgcactggtcccagccctggccgcagcctagtcctttctctgtggagtgggctgcaaaacagcagcgcaagaggagacagtcttcgtcaggtgtgggtgtttggtgcctgcatgggtggccttgcacagagcagttaggggaagatgagggggaggcatggggctgggccagctctctgggatacagcctggtcagagagtaaatggagcagaggagcaggtgtggcagcacctgcccttcacctccctgaccaggcccgtccctccttcgccagtgctgtgcagagctcatttaaatgtattcctttctaggtctgggcgcggtggctcacgcctgtaatcccagcactttgggaggctgaggtgggtggatcatgaggtcgggagttcaagaccagcttggccaaacagtgaaaccctatctctactaaaatacaaaaattagctgggcatggtggcatgcgcctgtagtcccagctacttgggaggctgagacaggagaattgcttgaacccaggaggcggaggttgcactgagccgagattgcgccactgccctctagcctagacgacagagtgagactccatctcaaaaaaaataaataatttctttctggttgtattttcaagtcacaaattggaaaaggcttacatctagggacccactgttgattcctaagttgtgggtgggtgatatcagtggcctcagtgcctgcataaccctcacctgtttatgactgatctactgtaaccttcctcaggttgagagtgagctgctgtgagccagtgacaactactgctacaacttgctgttacttgaaattcgtgtgctatgttggtagcacaggagtaggcgggcgggggttttggtgtgggcactaggtaagtgggtggcaaccggctctttgggaccattggtgctgacctttgcctggtcacctgcctgtgcctaggccaagtgaatgttacatcttggaacctgagccatggaggtggcgccacctccctgaggagaaaggtgtggccaaaggaaactcctgcatggctcctgctccttccccttccctacatttcacttgggctaatgatgtaagccccccttgaggttggggatggtgtggagatagctgcagacacccctgtaacagacatccaggaagaattagggagtgggggtaattatagttcctaggtctaggggtgagaggtgggagtagaaccagaagtgccctggaatccagccgtgtcagccctcaccccagggcccccaggaaagcatggcctgcttgaagccctctgctccctgcagaaactggggcgaggaggagctttttccttcagttagatctttcccttccctgctgcctcgctcccttagctttggagccctaaagttagtggacaagacactgggataaagctctatggctgctggaaggaggtctgagtctgtgtgtgtgcatatgcatgcatgtgtgtgtgtgtgtgtgtcctcatttgcagaagtcttgctaccagttagggtgttaagagcatctccactgggcggagacctggcatttgttttccactgttaagagaatgacacaccccctgtcatgtaagggaggagctattgagttagacattttccctatgggaatcctcggtttggtttgtgggaaaggagggaatggataagtgatttttatctctaatcgtcaacacagctgttcttccactgaatttgtgctattgcatacatgtagccatctttcttttcactgcagcagtgtttatcagtagttcaaaatgatttatttgctcctggggagtaaaaccttttttattaaaaaaagaaaaagaaaaaaaaaagaaagaaaagtgtgcccccctcctatgctgcgatagctataaaatgattgggtcacaaaggtcaagtctgcacgtccctgtggtagaccctgctttcacattggagccttcacactcagcacaaaatgattggaggccttgataaaatggagagcaaagtcttgggagcagtgaaatgggggttggatcatagagacaggcgctggggactcgggtactgcagttaggaaagtagcgttatgagttgtactgaaaatgttgattctctaatctgccagaaaaggacctgtcttttcatgcagatttcatattgtctttgtccttttcattgcttcttgaccttcctggcaggtgtcgctcagtttcttcctgtttcccttcctgtcctctccacacctgctatcccgtcccactcccatctacctcccgggaagccagccctgcatgctgagtttgtgacctgcttcattcccatttcatttctagagggtttagaggtgacctggaaccgttccctttccctctcctaccccctcctctgcaacaccaagaggcctggaggggcagacagaaagcagccagccacggcgggaagacatgcatgtttggttgcagctggactgcgatcgtagttcctcctggagatagagtgtgaggaacttaggacactcttcctcagactctgggatcatcacataccacactgccccgctcagagtttcgtcctgagctccctaaccagctcaggtggagcagaagcctgctctcactcctccatctctggtgctcccttgggcggggacctgtccctcactcttaggcccagaacctgtccaagggacaggtagggtccaggtgccactttgggtagctggctgttggaatgcccacactggtgctgcctgtggcatagccactgctgtacgtttttggttgtttttaagaaactcgatgaagaggggtgtcattctgggctcggggtggttgccaatttttcaccagaaagggagccaccccttgcaaccacttctgtctccgttagccccccctctgccctcctccaagccaaagcgtggcctggcttttgtcttcccatttagttttcctcttttacccttccttttgtgcttaatttattaaaatagttgctgtataatttattttcataaactataaaaaaatactaaatggttaaaatagacttgcaggccaatcttaaatggggtgggaggggtctgagggtgggatggggaaagggaaagaggttttgatataaacaaaacaaatgcactttgggtgtgttttggtatttttctggggatagagggggtggggttagggatgtccctgtagattagttccagaatggggtgtctgtatatactgtattaataggcatgtttgactctcgtaaagggacgttagtagctgctgcaggtcctgtttggaaaccccatgtacaattcccagttttttgtaagtgtcagtgcgagagacatttgactcttgtgtttgtatctcctttttatgattgctgtacctacccatgtctttttggggaggggtgaaaagagatttgaaataaaaatgtttagaaattatttcatgttctttggtttggtgtttttcactccctctcccatctcatgtgactcctgacatgccccaataggatctgatgacccagccctggggaatgggtgatccctgtgatgtcagccaagcagagtgcacccagcactaggcttgtcagaattagaggtgctgaaaaatccctgaggctgatggccactgctcagagctaccttctccttccctaggaagtgtaggagcattcccgagagctttctggggctgagtgcccgtggcctttttgtcttggtgagcattggcgtggggctctacctaaggagagttcatatttaccatagcagtcattcctagtattccctgtggctggcaccaaggtttttcctaagttcaacccatagccctcctgctgcctttctagcctactattgcttaagctgtgctcttcggagagaaagggactaagttgttcctctggttgacaacgtgtgtatcggcatatcccggggattttgtgggttccattccagacaaccgcaataaagtgaacatcacaataaagcaagttgcacaaattttttggtttcccagtgcatataaaagttatgtttacactatgctgttgtaagtgtgtaatcttaaaaaataatgtgcataatttaaaaatactttattgctaaaaaacacgatcatctgggccttcagcaaattgtaatcttttcacttatgaagcatcttaccacgatgttgatggctcctgatgggttagagtggcagttgctgaaggttggggtggctgcggcaatttcttgttctttttttttgagacggagtcttgctctgtcgctcaggctggagtgcagtggtgcgatctcggctcactgcaagctccgcctcccaggttcacgtcattcttctgcctcagcctcccgagtagctgggactacaggcgcccaccaccacgcccagctaatttttttgtatttttagtagagacagggtttcactgtgttagccaggatggtctcaatctcctgacctcgtgatctgcccgcctccgcctccaaaagtgctgggattacaggcgtgagccaccgcgcctggcctactgtggcaatttcttaagatcaccaataaggtttgctgcattgatttgactcttattttcaaaaaagatttctctgtagcatgtgatgctgtttgatagcatttccacacagtagaactcctttcgaaattggagtcagccctctcaaatcctgctactgcttcatcaactaggttcatgtaacattctcagtcctttgttgtcatttcaacaaagttcacggcatcttcaccaggagtagattctatcttaagagactactttctttgctcatccataagcagtaactccagacaggtgtgatggtacgcacctgtagccccagctactcaggaggccaaggcaggaggatcccttgagcctaggagtttaaggccagcctgggcagcaaagcaagacccagtcttgtcccttaaaaaaaagcaactcccatctgtttaagttttatcataaaattgtagcaattcagtcacatcttcaaggctccacttctaattctagttatgctattaccaccacatctgcagttacttcctccactgaagtcttgaaccccctcataggggaattaacttcttcgtggaattaacttccattttcgtggaattaacttctttcaaactcctgttcatgttgatactgtgacctcctcccatgaatcatgaatgatctttgttttttggaaatggagtctcactctgtcacccaggctggagtgcaatggcatgatctcggctcactgcaacctgcgcctcctgggttcaagcgattctcctgcctcagcctcccgagtagctgggatttcaggtgtgcatcaccatgcctggctaatttttgtatttttagtacagacctggtttcaccatgttggccaggctggtcttgaactcctgatctcaggcgatccacccgccttagcctcgcaaaatgctgggattacaattgtgagccaccgtgcgtgacacgaatattcttaatggcatctaaaatggcaagtcctttccaaaaggtttttaatttgcattgcccagatccatcagaggaatcactatggcagctacagccttatgaatgtatttcccttttttttttttttttttttttttttggagacagagtgagactctgtcacccaggctggagtgcagtggtgtgatctcggttcattgcaacctccgcctccccggttcaagcgattctgctgcctcagcctcctgagtagctgggactacaggagcctgccaccacgcccggataattttttgtatttttagtagagacggcgtttcaccgtgttagccaggatggtctccatctcctgacctcgtgatctgcccgccttggtctcccaaagtgttgggattacaggcatgagcctccgcgcctggcatgattgtatttcttaaatagtaaaacttgagggccaggtggagtgtctcacgcctgtgatcccagcactttgggaggccaaggtgggcgggtcacctgaggtcaggagttcaagaccagcctgggcaacatggtgaaaccccgtctctactaaaaatgcaaaaattatctgggtgtggtggcacacacctgtaatcccagctactcaggaggctgttgcagtgagccaggatcacaccaccactgcactccagcctaggaaacagagcaagactccgcctcaaaaaaaaaaaaaaaaaaaaaaagctggggctgggcgcggtggctcatgcctgtaatcccagcattttgggaggccgaggtgggtggatcacctgaggtcaggagttcaagaccagcctgggcaacatgatgaaaccccatctgtactaaaaatacaaaaataagccgggtgtggtgatgcatgctggtaattccagctacttgggaggctgaagcatgagaatcacttgaacccaggaggcggaggttgcagggagccgagatcacaccattgcactccagcctgggcaacagagagagagagactccatctccgaaaaataaataagacttgaaagtcgaaattactccttgatccatcagctgcagaatggatgttgtgttagcagtcacaaaaacaacactcatctccttgtgcagctccatcagagctcttgggtgaccagttgcattgacttcccgcctcagccgcctgagtaggtgggctgcatgtgccactacgtctggctaacttaaaaactttttttttaaattttggtagagaaagagtctcgctatgatgcccaggctgaagggcagtgtcacgatcatagctcactccagccttgaattcctggcctcaggcaattttccctccttggcctctcaaagcactgagattataggcatgagccactgtgcccagcctagcattcttttggaaacaatgggccccaaataaaaccccttcccactgtcttcacctccaaacctgaaactacctgcttcatctcctcatcacaaaggctgttccatcaaaccactgcaatggagtcttctcacgcacatacttacttgaattcaatgataagcacttggcaagtaatagtgccggagattcctcattcattccattgtgtgcccccccgattgaaggtgagatgggaacagtaagttttatgtctcttggttccctccagcctctcatagtgtgagcatctcgcgtataaggattccagtgcatatttgtactacgtggattctgaagaccaactgttttcactggtgctcagccaaaggcacaagagttgactccagctcaggagaggcactagctgatccctaatggagcccctccgcaaggggtttttgagaggaattttgcagcttcctctgctgcacacatccccattgaagctatgatttcaccatccgtctattgccatgtcctcattaggcattctccttcgtgaacctggacaatttcaactggtcttcctgcttctgtttctcctctctagtccttcaaaatgtccttctggccgggcgcggtggctcacgcctgtaatcccagcactttgggaggccgaggcaggcggatcacgaggtcaggaggagatcgagaccatcctggctaacacggtgaaaccccgcctctactgaaaatacaaaaaattagccgggcgtggtggcgggcacctgtaatcccagctatttgggaggctgaggcaggagaatggcgtgaacccgggaggcggagcttgcagtgagcagagatcgcgccactgcactccagcctgggcgaaagagtgagactctgtctcaaaaaaaaaaaaaaatgtccttctataagatctcactgtgttgcccaggttggagtacagtggctcaatcttggctcactgcagccttaacctcccagattcaagcaatcctcccacctcaggcttctgagtagctgggactaagatacaagccaacatgcctggctaattaatctttttgtagagacaagtgtctcactatgttgcccaggctggtctggaactcctgggctcaagcatcctccaccttggcctctaaagtgctgagatttcaggcatgagccaccatgcccaatggtgtcatttctttagtttacagtctttgatgtctttcaaccaagagaaatccccattgaaatcttgaccatcaacctgccttccaatgctgtttttccttccctgacacgtaggcttcagtctggtcacatgtgtgacctgaagcctgtaatcatggcatccctcctgccactctgccttccctcatggttcaccctgtgcctggaggacccttacctgtcaccctctttacctgctgaactcattcttcagggccctgccccagggtcactctgtggaattggaattgtcactagccacaaacaaatggctctttcctctcttatgacatttgttcatctatctctgcctgcttgttccgactgtgacctctgcgagggacagtgtcctattcatctctctccccacttccagggcctggcacagttaaatggccgtgccaaggtggtggtaagttgaggagatgagatcagcccccttcccacgaatgttgctaatattccctcccctctagttagccagtccttgaacctggatctccacctttcacactggacaactggattgtttagaggtggggatttttagtcaccaaatgccagtctttttcttcttcttctttttttttttttttttttttgagatggagtctcgctttatcacccaggctgcagtgcagtggcgcgatctcagtttactacaacctccgcctccccggttcaagtgattctcatgcctcagcctccaaagtagctgggattacaggcatgcgccaccatactcggctaatttttgtattttttagtagagactgggttttgtcatgttggccaggctggtctctagctcctggcctcaagtgatccacctgcctcagcctctcagagtgctatgattacaggcatgagccacagtgcccggccccaaatgtcagtcttctgcaaaactttctcaagagactgaaattttcatggttggagtaggagtgtgaaaggtgtgatacaaggtggatgcggtggctcacgcctgtaattccagcactttgggaggcctaggtgggtggatcacctgaggtcaggagtttgagaccagcctggtcaacatggtgaaacctcgtctttactaaaaaatacaaaaaattagatgggcatcgtggcacatgcctgtgtgtggaggatgaggcaggagaggatcacttgaacccgggaggcggaggttgcagtgagctgagatcgtgacactgcactccagcctgggcaacagagtgagactctgaccaaaaagaaaaagaaaagtaaaaagagagagaggagagagagaggaaggaaggaaggaaggaaagggagggagggagggagggaaagaaagagaaagaaagacagaagtatacagcggtaacccaagatgttccagaggtgggatgtggactgcttcctcttgacatcatagaggatgacagagctgtcgctgctcttggatggaagacgccactgatctagggtcagctggctttgtccagtggccagagactgcactgagccacctgctactccctgctgagttatcacttaacagaaaccctgcatttaaagagagctcaacccaggcccccttctcacatcctaggcttacatcccaggtttctcatctcatcagggtcagggtggggggtgggtgtcaaggcctggcttcctggcccctgcactgctgagaaacttgattttatttctgggcccttattctgcagatccagggatgatgggagaacgggagaggctagctggatttatactgggagagaaaagtaagaggaaatggtaatggctgagcttgggggacattgagaaggtttggaaatgggtaggaaggtctttggcaacagctgtcctgtgtgtgagaccgataaagtcaagatgtttcactatgcagtgggtgtcatctcttggtgcctcttcttccccatgccctggtattgaaaaacctgatatatgggtccggcgcagtagcccacgcctataatcccggcactttaagagtcaggagtatggggaaggcatggtggctcatgcctgtaatcccagctctttgggaggcagaggcaggtggatcacctgaggtcaggagtttgagaccagcctggccaacatggtgaaaccccatctctactaaaaatataaaaattagctgggcgtggtggtgggcacctgtaatcccagctaatcaggaggctgaggcagaagaatcacttgaatctgggaggcggaggttgcagtgagccgagatcgtgccactgcactccagcctgggtgacagagggagactcggtctcaaaaaaaaaaaaaaaaatagagagtcaggagcattgcttgagcccagaagctcaagaccagactaggcaatatggcaagaccccatctcttttttttttttttttttgagatggagtctcgctctgtcacccaggctggagggcagtggcgtgatgtcggctcactgcaagctccacctcccgggttcatgccattctcctgcctcagcctcccgagtagctaggactacagatgcccacaaccacgcctggctaattttttgtatttttttttagtacagacggggtttcaccatgttggccaggatggtcttgatctcctgacctcgtgatccacccacctcggcctcccaaagtgctgggattacaggcgtgagccaccgcgcccggccggcaagaccccatctctaagaaaaaaaaataaaaaattagctgggcatggtgacatgtgcctgtagtcccaaccaatttaagagactgaggcaggaggattgattgagcccaggtgatcaaggctgcagggagctgtgattgagctactgcactccagcctgggtgacagagcaaaactctgtctcaaaacaaagaaaaacctgtctggatacggggcagatatgtctttgactgggatcccatacggctctggacatgttaaacgccgactgcatgtggagagcgggctctgtgtcttgctcatcttctgggatgacccccatcccccagccgagcacatgaagggatacctgtgaatgtttgccaaaaaccatggagcaggtcagaggcagagccaggccaggagggaggtggcagtggggaaaggtcttctaggctggaatcacctttgggcctggaccggggagctcccatattggaatgggagtttatgtgggaactgttttcagcaaatgctggtgggggagaccgcagaatgcattgtggagtctggcggagaggcttcggggatggtgccgtggttctcagccagggcagaggctttgtgagcttgaatcacttagacaacattttcacatctcactcccaagactaagacaccctcctagaatctcaaggggttgtgggggagagcggtggtgaggatagcagatgagacatctcaggggcatccacgggctcttcgcttcctcccatgctcctgcctgcctgttaagactcctggggagggcctggcccaggatttgctgacccaagtttgagtcccggctctactgcctgctcgttttgtgatcttgggcactttatgcttttttggtctgtttcctcctgagttttatttcctacctcatgtgtgagtaaatgagacatgtgtgtaaaatgcctggtacatcttgagcacttaataaatatccacaaaagcctgcgcgacatagcaagaccctgtcttcataaacagtaaaaaattagctgggcatggtggcgtgcgcctgtagtttcagctactcaggaggctgaggtgagaggatcgcttgagcctggaaggtccaggctacagtgaatggtgatggtgccattgcactccagcctgggcaacacagcgagactctgtctcaaatgtgtgtcatctctctctctctctctctcggcactgattatgatcattattattattattattatttttgagacagggtatctctctgtcaccccggctggattgcagtggcaagatctcagctcactgcaacctctgcctcctgggttcaattctcctgcctcagtctcctgagtagctgggattataggcgtctgccaccacgcctggctaatttttgtatttttcgtagagactaggtttcaccatgttggccaggctggtctcgaactcctgacctcaggtgatccgtctgcctcaaccttccaaagtgctgggattacaggcgtgagccaccgttcctggccccatgatcattattattagcgggctttttttttttttttttttttttttttgctgggagagggaaagagtctcgcccatcacccaggctggagtgcaacagcgctattgtagctcactacaacttcaaacttctgggctcaagccatcctcccacctcggcctcccaaagtgctgggattacaggcgtgagccactgtgcccggccctgttagcagtattttgaaaactaggattgagattctttttgccaaaggcagaggaagaatgaaaagctcctcttaccggaggccgcagaggagcgggctgtagggaaaaagagaggagggagcttccaggtggggaagggcccggaggctgctggtggccgcgggcagagctgggtgagtcattgggcttctcctgccacctagtggctcctcagggctaagccaccctgctgttccctcaggtcccctcggtggtggtggggtgaggccgcacttaaatattcctaaacacggtgtctccagtcctcttctgttagcccattaaacgccctgccctttcagggaccctggcccatgaggcatccctcacctggccctggtgtgtgggacacgaccccctcctccaggtggagggagagcgagaagcctttgttctcctggctccggggcagagttggggggccgaggcggacacctggggacggtggatgccacgttcatgcaccccgcccccgcttgcttgatggctgctcatgggagagactggggcccgggaccatgtccgtgtctgctgcgggttctagttaattctataaataggcactattttgtgcagggtccgggttagggctctcctgaaccttcccatctcaccttctcggaggactttgcctttttgtctccagtatggagagggtgcggacagagaccggccgcccgaggcctgagagccggatggggcctctcctcatgcccctccctctgaggaggctgcctggagtgatggcctggttgcatcatgccctactcctgcctattaggtggctgtgactactggggaggggtctggccctgggtgaggggcttcaggaggaggctgagggtcctcatgaaggggccacacgttggctgtgaatcaaggtcaggcgtcctgccctgctgcccactgccctccccgcccctgacacccacttctctctcggggccctgcagcctcagctgcaccaggccaggattgcatcattcttggctttgttctcagagcagcaggtgcaggagtggggcctgccacccgccgcccccctccttccctctcatctccttccactccctcctgggtaatccccctccttcctcccttcctaggcccatggcaccccgggagttgtctgccttacccgtggctcttagctccctttctaccttctccctgttccccagggagccctggaggctaccgaggtggaaggaagtagactggggggcagggatgagcaccaggctggaaaccgccattcttcacctctagcccccaactggctgaaagcaggtgccacccgcaaagggaacacccggttgtagccagggtatagcctcctagaatttggggacaaggtcagaaatcgtcacctgctgaactaaaactaataataatcaacataaaatgaattaattcagccctttgtagaaggcacttaacttttttttttttttttttttttgtgagatggagtctcgctctgtcacccaggctggactgcagtggcacaatctcggctcactgcaacctccgcctcccaggttcaagaatttctcctgcctcagcctccctagtagctgggattataggcatgtgccatcacgcccagctaattttttgtaattttggtggagacggggtttcaccttgttggccaggctagtctcgaactcctggcctcaggtgatccgctagcctcggcctcccaaagtgctgggattacaggcgtgagccaccacaccctgccggtgcttaacttttattgatcacttctgtgcccaccagtagaccgagcattttagactcacattctcatgtcatctttcaacagctctgtgaggtggtgcggttagcatgtctggtttacagataagggagctgcagggcagagaggtcagaacacttgcccaagactgcgcgaatattaaatggcaggtctgggaggtgagtcctggtctgcctccctcttgaagcctctggaagagatggttggaaaattcgatgctgacccacccggaacattttttttaaacccctaaaagattgtttttggccaagacactcatcaagagataagtatcttattttaactttatcaaagagatagaataaataacaaatatccatggaagcctgggctacatactgagaccccgtctctaaaaaaataaaaaattagccaggcatggtggcatgcacttgtagtccctgctgctcaggctgaggtgggaggatcatttgagcctgggaggtggaggcagcagtaagtggtgattgcaccactgcactccagcctgggctcatatcaaatgagccctgcccctctccacactgctgtacctctgaggcaacattgttgctgaaggttctggtccctgtgggatgtagaagaagagaagcactgggggatccagcctgccagggaggagggaggactgggggactgcacttgtggaccctgcaggctggcacagagactgtgggtggtactatcccttccttattcaggaactctgcttgtgaatcttcctgcagtgttcaaggtgtgttgataagatagcattgggtttagcaatctagccaccatgactttggctagtaggagtttactcctgagagccagattagcatctctgaggacagacagtccctgatcttgcaaagcccaacaccagaccctaggcctggccaagcaacagctatttgaaggcccagcatgggtggctaccgccgccaccaccttcttgttctcacttcctcagcactgaaagagaacctgagggaaaccaactggagagaatggagcctggcttccacagccagggccctgctacaccacagcccgggagagtgcggctcagggcgaggggcaggcttgctggctgacactcttctctgtctccagtctctttagctcaagacagactccgtctgaagggacaaagggccccattgacctcatagccttgtgaccccacccaagtctgtccctccctccccaggcagccagcagggtccttgagtagcagacaggagccacaaggccgctgggagggcactggcggggaagccaagagaggcggcagccagctggtcagggaaaactgggagtgcgtgggcagtgcccaccagattgccaccaggggaggccaaggatgagggctccgggtactcctggctgtagtcccaggagcaaagcagcaaataccctgcagggccacagcatgggaggctgggggagtccaacttcagccccaaaatgggctgcccggagctcagggcctccctggcccacattcctgtctccctgcccccaacatgccccccacacccagcctataaagccccctttgtctgagccactgaggatcttaactctccccatctcagcttcccaccccctctccctcatcctctggtgcctaacaaagaggccagggctcagtgagaagtggtgaagccaccttcatgccagcctgggcattggcccagggggtgtgggcagccagtgcctgtaaaccaatgcctccaccccaccgcccacctcggggcaggttaatttccacccttgtccactggggattgcgtacccctgcccagggcagcgtgcccacctctcacatgaccatttatgtgatgcccctctcagtttgtcctgccctgtcagatgcagaacagagggcagtgggtggtcaggagccacacctgatggagggtgtcagagagcgaaggtgtctttttgccatctccttggtcttcaccagagtgggcggccccgctgcccacacattatgttctccagtagtatctgggggttcagatcccccttctctgggagtggataaacagatcagccccctcctcctgcttggcaagtgccaggaacatggctcactgggtgggcaacaggaatccccatctctttttcccacacccagccaagggcctcagaacaccttcaactataggctggacgtcggcaacagctccctgttcccacagcgatctcgaggtgggggtggcacagtgtctccctgagtcccagtgctctgggtgtctctggcctgctgtcagtcaccccctgcagcgggtcgtcagcttgggaggcagttggtctgggatcaactgggatcagctctgttgccaaggtgcggtgagaccgctggcaagccactctctggcccctgtagcatgagagtagggtccttccgactccgatgagcctcaggaatgaggaaagcggcttcgcttgcaggggtctcctctcccctagcagcgcccccaggacgggcagaacagggggtgccggagcgggctagccagggatgtgcgagggtcgggtgcgcgttgtgtgtgtgttcgagtgtgtgtgcccccacgtgcgtgcgtgcgattgtgcggttgcctgtgagcgcgtgtgctcgccggtgcgcggtgctgccacgggccgggcggggtgaggaggggagggggcgggcggaggggcggggccggcggggcggggcggtgcggggagggggctcgagcgctgacaccagccgctacttgcgcttggcggtcgccgggtgcagctgcccggacagggcgcatggaggggccgcctccccctgcgccccccggggccggcgcggcgaggacggcatagcagggcccagcatggagcaggtgagcgggcgccgggcgtgggtgcgcggccgagaggggagagagagctgcgggcgttgtgacccggcgaggtgggcgcgccgagcgccgagggccgccaccgagggaggggttggggcattggagctccgggcggagcgggggctctgggggagggatgggactgatgtgacacagagctcacacacacacacacacacacacacacacacacgagtactcccttatcactgacacctaggaaggcgtgtgcagagggcacctctctccccaccccctttccagaaagagatcacccacacggagaaacccccatccccacttggtaagggtacagcccctgctccctgaacccaggcccaaggaggctacagactctgcagaatgaaggagtgggtgggctctgtgccatatgactactggttcgttgacccccagtccctcctggtgggacctcaagatacgccggtcccctccccctacacatcaaggggtttcttccagcccggctcccctcctttcccagtcacagcagctgcagcagctgctgccaccatttcatgtcagtgaaaagatggggtgggctaagaggctttctccaaatgcaccccaaaggcagagctgcagccccagccaggttttgggaggggggtgctgccttcctttcacacaggctccatcagaatacactgagtgtgggctgggctcagtgggcggggatgaagaccccctctggtcagagttctcattccctgcacggagctcagcaaatcccagacaggctggaccagtccccttcagtgagcaaggggctgtatcctgacttgcagccccctgatctaagagaagccagcagcctgatggggggcagagcgagggggctgctccaggggttgccttactcccttcccaacccccacttggggtgaggtctcaggtggggtctggagaggcgggataggttttctatttgggacacacctttcagtgctcagccgccctaactcccttcttttcctggcccaagttctttggggctgttctgcctaaagcagtggctgggggccctggctctgagaccctcccctccaggctgagcacaggccccctatcactctggcagagggcttgtgggtggcctgtgatggtggtgaggagaggggtgaggaggagtggagggtgaggagtcgggggaggtggagtccgtggaaggggtgaccctaagttctggggggttggagaggggcactgggaggcataaagtgctctgggcatcctccctgggctgggtgtgagtctggggcggggctgtggctggtccagtttccaggcctgtttggcatcttgggcattaatttaaatggccaatggcagctccccagagcagcaggcctggctgctattgtcattactgactgaacacaaaaatagtggtagggcggggagggagggaagagtagtaaatgccactgaattgctcactgtaaaatggctaattttacgttacgtgaatttcacctggatttttttttaaaagaggggcagggctaggggccactactgcttcctgtctagagaatcctaaatgcatctcactgggcctgcagctcagcctgagttgttcctccaagtagcccatctgcccatcattggccttcatcagccctccgtaactgttctggggatcagccgcttcccctttcccagaggacagaccacagcctgctcccctgtaccctcccctgggaggagaaacatcaaggggagtcaggacattgggcttctgcccttggctccattacagaatcattgggaagccttggacattcatcctgtctgggctgctgtgaaatctctgccagctatgccaagtggtggcttcttggtcctttctggatgtcctaggacacctctgccaagcacagcagctcagcctgtcccctggactgtgaggtccctccccacagacatggactctgatgatcggcacactctccgaggtgcctaggctgatgtggttaacgcccggctttctggatgcaccggaagcgtggtgtgtatggagtgcgtctgaaatcagagcttctttcattgcaccaggggaagctcctattttaagtttcccatgtgctgagccctcttgtaaagcaaagaatccttttatagtgcgtgagccgccgatgtgtctgtttggtatgtgtggattttggcatggagggcttccttaaaggggagcatgcctggaatctctcacgggggctggaactgctgggtggggtgagtgccaggactgaggggcttgccccactgtggtcagtcccgcccctcttttctcctcatctgactcccaacactcccacccagggctggctcagggccagacagaggagaggggagcagctgcagggggatttccagagcttcgacggggaggtgggagcctcctctctaatcccttcccctttgcttcctctctcttcccttcctctatgttccccttctttcctctttgctcctctccttcttcccttccagaagggcaaaatggagacagggaggaggatgggtcccatgtgcagtgatgtgtggggaccaggtggggctgggcaggggctgggagcctggaacagaagcaggaagaattgaaaagccctatgtagaactgtagaatttagcatcctgagctggaatgaactccctggcctgacccctcccagagggatcattcgatagaaagagcaacatcagacttcggctagaatcctgaatcctagctgggagatcttggacaagctacttagcctctctgtgtctgtttcctcatttacatagcggggctaataatacccaccttacagtgttgtcatggggactaaatgaaataatgtttataaagagcttggcacatagtgggtgctcaacgtattttaattcctttcctctccgtcttggtgtttgcaagcccctgctgagtgacggcatggtttttgtaaggcatctttgagcctcgcgcacactcactcatacacagggtccgtgccaccggccttccctgacagggtgtcacacagtgaaaagcctgctgggctgggtttcccaaacgtagtttccctaaagatggccagttcagagtggcaggggtggattttctgtcggccacctcctgacctgacatggggcctcgctgggtgtggcttgcttaccctgctgccagcttaccctgctgccagctcagacaagatgcagcctctcgctcccgccgtagccagctgtccagaggttttctgcgtaggccccagctgcttggcagattaccagagctctttggccccagcctggccatgggtcttcagcctccctccccaaggggtgttcaggtgggattcttctcacaggattcctgggagacctgacaccagggatgagtgggaactggcatcatcttgagtggaccattgccccaccctccatcattaaatatggtcagtgaggttcactctatgggatgtctggggctgtggccagcgcctgtgccccaccctctccctcctttctctgacgtttgctagtagagggctttgaggtctaggacaaaccctgcctgcctcccaagaccccttcttcctcccctagtcactggaggctccttcttgttttgctcaacactgtgcttgcaccacaatctcagcaccatcccaggcaccctttgctgtgtttgttgccctccgtggaatatggggacggttccctccctaccacccaacacagcagtttgcatgtactaggtgctcaataatttttttttttttttgagacgatgttctgctctgtcacccaggctggagtgccgcggcatgatctcgactcactgcagcctctgactcctgggttcaagcgattctcctgcttcagcctcccaagtagctgagactacaggcacgtgccaccatgcctggctaattttttgttttgctttttgtttttttttttgaaacagagtctcattctatcgcccaggcaagagtgcagtggcatgatcgcagctcagtgtaacctccatctccccagttcaagcaattctcctgcctcagcctcctgagtagctgggattacaggcgcacaccaccacgcctggctaagtttttgtatttttagtagagatgggatttcaccatgttggccaggctggtctcgaactcctgacctcaagtgatctgccctcctcagcctcccagagtgctgggattacagatgtgagccaccgcgcctggccaataaatgtcttttgacttgattaaatggggcccctctcgctttggagatacaaactgtggtgggggtgttgcctgtgggggacaagtagaggacctgggggctgaagccataaaagtgcaagaaccgctgtcccctttagtcctgccctgccatccttctccaccaggggatgctctttctcctttggtggaagggcctgagctggggccaggtgtaggtgcccgtgccccataacccacctttcatacattatggtttttccttttcagctcacagagtttttcagattctttgtcaaatgtgagcctcaaatcagaggcaggccgagaaggccttatcgttttcatcttacagagggtgaaactgaggttctgagaatatacttgttctcaaaagtcatacagctactgggggctggggcgcagggagggtgcagcacgaatttgaacccaggtcttcagattcttgattcagggctcctttgaggacatcataaacctgggttcctcctctggagccccaccctccagatacttttcctccagtccgctcatcacgccctccttgcgtcccctccggctgtctctccttggcacctgctcctcaacccaacagcctgctgaagtcttccccacccaaacagacacctgccttgtccacacccacctgtgctgcctgcctgtcgcctgtcccttcctgttaatgctcagtgggcagattcgactccctcctccctggggcccctcctccctgcacagtctgacccccacacccactggcccccgaggctgttgtctctgccccacacagtgccaccttctctggctgcctgcttcctcccagtccttgttgcctcctccttctctgcctacccccaagccagggttcctctcactcttcactctccctggagaatctgaaccacacccctggtctcagggactaccagagtctctagctcaagcctctctttcagaagatggacccacggtttaagcagcctgtcaccattccaccagcctcacagcctgcgggttaagtgtatagaccctggagcccaaatgcctgggttcaaatcctgtgtggccttgggtaagatacttgagttctctgggcctcattttccttatccatagaatgaggattgagatctatttcacaggcctttgtgaggcttaactgggatctcacatacaaaggacttcgtgcctggcttgtcccctctctctgtgaacaccctagacaacctgatattccaggccttggccttgccctgcactcttccatttccttcctcctgctcaccaaatcccagagcctctgttgtttgttgcccctgccccttgctttggtacctttctcctagaatcactttgcttgccgccctccattcctgttcccgttatgtgccacggtggccatggcacatcgctgcttcagctccctgccccaaaccaggctagcacggaagcgcctctgggcagcccctccagcgtcacacccccgcctgtgtttccttcctcatccctccatgcttcctgcccataggcaccctccacttggctccagccacgatgccgatgccggagcctgctctctctcctgcctccctggttcgccctgagcatcactctccctggagtgcctttttccctattcccactctcccctgccccatccaggaagcccaagaagctcaaggcacctcctggggaagcctcctctgcttctccagccgaatgtgctcctgtgctgggagttctttatagagtcacaactggaggagacccaggcccctcaagggaaggatctaggcctcacctctgtattcccagggccaacctaccccaccccctcctctcctctaccccctcacatagtagaccttgtgaatgaaggatggtgattgggctggggaaggagtttggaaagagggggagtatgaggagggtcctcaaccagggagactctccccatgttgggctctatggctccaaaccccaaaaaaatagggtacaggaatacagtgggtgctggggcggatggcaggatgcatggagtgagacccagagtgtcgagagaggaaggggagcccggatggagaggaaggtgaggaggaagagcagctaaagaagatagatgaggtgggctgggacagggtgggggtgcaggtcaaggtgcaggaagaggtgggaagggcggcagggtggggagagagccgcactttctgggaagtgggagcgggtgggggaggctgtgcagtgcattgtggagggaggaattcgcctgccggtcagtgtgagctcatttcctctcaccccctcctgcggggtctgagggcatcaggctctggaaaaagtgagccaggggcaccccacggccaccaccctccctcctcccccatggcctcagttcagtctgatttcagatgccaacctttctccctcacagagacaaccctttatcctgggaggaaaggacctctgagccaaggtggcaacaagcattggaccactggagctacagggcagaaagagacaggaacagggacctggtggaaagttaagcaagaaaatccaagcagtaggccaggcgcggtggctcatgcctgtaatcccagcactttaggaggccgaggagggtggattacgaggtcaagagatcgagaccatcctggccaacatgatgaaaccctgtctctactaaaaatacaaaaaattaaaaaattagccaggtgtggtggtaggcgcctgtaatcccagctacttgggaggctgaggcagaagaatagcttgaatctgggaagcagaggttgcagtgagccaagatggcaccattgcactccagcctgg
